(19) United States
(12) Patent Application Publication
(10) Pub. No.: US 2024/0218356 A1
(43) Pub. Date: Jul. 4, 2024

(54) METHODS FOR PREPARING A LIBRARY OF PLANT DISEASE RESISTANCE GENES FOR FUNCTIONAL TESTING FOR DISEASE RESISTANCE

(71) Applicant: Two Blades Foundation, Evanston, IL (US)

(72) Inventors: Matthew James Moscou, Norwich (GB); Hendrikus Pieter Van Esse, Norwich (GB)

(73) Assignee: Two Blades Foundation, Evanston, IL (US)

(21) Appl. No.: 18/558,574

(22) PCT Filed: May 11, 2022
(86) PCT No.: PCT/US2022/028686

§ 371 Date: Nov. 2, 2023

Related U.S. Application Data
(60) Provisional application No. 63/186,986, filed on May 11, 2021.

(51) Int. Cl. C12N 15/10; C12N 15/82

(52) U.S. Cl. CPC C12N 15/1093; C12N 15/8279

(57) ABSTRACT

Methods are provided for preparing a library of candidate plant disease resistance (R) genes against a plant pathogen of interest. The methods involve selecting from each of one or more plants of interest a subpopulation of highly expressed nucleotide-binding leucine rich repeat genes (NLRs) from among the population of NLRs that are constitutively expressed in an organ or other part of the one or more plants to produce a library of candidate R genes. Further provided are related methods for identifying R genes against a plant pathogen of interest using a library of candidate R genes and compositions comprising the identified R genes.

### CROSS-REFERENCE TO RELATED APPLICATION

[0001] This application claims the benefit of U.S. Provisional Patent Application No. 63/186,986 filed May 11, 2021, which is hereby incorporated herein in its entirety by reference.

### REFERENCE TO A SEQUENCE LISTING SUBMITTED AS A TEXT FILE

[0002] The official copy of the sequence listing is submitted electronically via EFS-Web as an ASCII formatted sequence listing with a file named 070294-0201SEQLST.TXT, created on May 9, 2022 and having a size of 1.88 megabytes, and is filed concurrently with the specification. The sequence listing contained in this ASCII formatted document is part of the specification and is herein incorporated by reference in its entirety.

### FIELD OF THE INVENTION

[0003] The present invention relates to the fields of plant disease resistance and crop plant improvement, particularly to methods that are useful for the identification of plant disease resistance genes against plant pathogens in a crop plant of interest.

### BACKGROUND OF THE INVENTION

[0004] Plant disease causes significant yield losses in agriculture. Among the most damaging diseases are filamentous plant pathogens, most notably fungi and oomycetes. These pests are key challenges for growers and cause significant management costs. The most cost effective and environmentally friendly way of managing these diseases is the use of resistance genes that can often be found in wild relatives of crops or even unrelated plant species. Wild relatives of domesticated crops contain many useful disease resistance (R) genes. Introducing this natural resistance is an elegant way of managing disease. However, traditional methods for introducing R genes typically involve long breeding trajectories to avoid “linkage drag,” i.e. the simultaneous introduction of deleterious traits with the R gene. Furthermore, R genes tend to be overcome by the pathogen within a few seasons when deployed one at a time.

[0005] An approach to preventing a pathogen from quickly overcoming the resistance provided by a single R gene is to deploy simultaneously multiple R genes against the pathogen in a crop plant. Although such an approach can be accomplished by traditional plant breeding methods, the multiple R genes would very likely be found scattered throughout the genome of the plant of interest, making the combination of the multiple R genes into a single plant extremely laborious and time consuming. In addition, this task becomes more challenging if multiple pathogens are critical to be controlled to ensure a successful harvest. Alternatively, transgenic approaches can be used to rapidly deploy multiple R genes into a single crop plant. The multiple R genes can be introduced into a single crop plant as transgenes via routine genetic engineering techniques. Preferably, the multiple R genes would be introduced as a single, multi-transgene cassette that segregates as a single locus to facilitate the rapid transfer of the multiple R genes to breeding lines and crop plant cultivars.

[0006] Traditional map-based cloning of R genes remains challenging despite great strides in sequencing technology and biological insights; large tracts of plant genomes are inaccessible to map-based genetics due to lack of recombination. Most R genes belong to a structural class of genes that encode nucleotide-binding leucine-rich repeat (NLR) proteins. NLRs (i.e. genes encoding NLR proteins) tend to reside in complex clusters in plant genomes, and many hundreds of NLRs populate a typical plant genome. Thus, a scientist using a traditional map-based cloning method, therefore frequently delimits a map interval containing multiple NLRs and must find out which confers the resistance of interest. Recently, a new method, which is known as Resistance Gene Enrichment Sequencing (RenSeq), has been reported that allows rapid scrutiny of all the NLRs within a plant. (Jupe et al., 2013, Plant J. 76(3):530-44). While the RenSeq method can be used to the rapidly identify NLRs sequences in a plant, the RenSeq method does not allow for the identification of an NLR gene that is specific to a plant disease of interest in the absence of additional genetic approaches.

[0007] More recently, MutRenSeq was developed to allow for the identification of an R gene that is specific to a plant disease of interest in the absence of additional map-based genetics (Steuernagel et al., 2017, Methods Mol. Biol. 1659:215-229). While MutRenSeq has proven to useful for the identification of NLR genes from plants comprising resistance to plant disease of interest, the method depends on producing a susceptible plant by mutagenizing a plant that is resistance to the disease of interest and then comparing the nucleotide sequences of the NLR genes from the resistant plant with the susceptible plant to identify the NLR gene that was modified in the susceptible plant. However, because the production of such a susceptible plant can be challenging, new approaches for identifying an R gene for a disease of interest that limit the number of potential candidate R genes and that do not depend on the production of a susceptible plant by mutagenizing a plant harbouring an R gene for the disease of interest.

### BRIEF SUMMARY OF THE INVENTION

[0008] The present invention provides methods for preparing a library of candidate plant disease resistance (R) genes, particularly R genes encoding nucleotide-binding leucine-rich repeat (NLR) proteins, against one or more plant pathogens of interest. The methods comprise selecting from each of one or more plants of interest, a subpopulation of highly expressed nucleotide-binding leucine rich repeat genes (NLRs) from among a population of constitutively expressed NLRs in an organ or other part of the one or more plants, so as to produce a library of candidate R genes. The subpopulation of highly expressed NLRs comprises NLRs that are highly expressed, constitutively in an organ or other part of the plant in the absence of the plant or any organ or other part thereof being contacted with or otherwise exposed to one or more plant pathogens of interest. Such highly expressed NLRs are those NLRs that comprise a relative expression level in the organ or other part of the plant that is greater than the relative expression levels in the organ or other part of the plant of at least about 65% of the NLRs in the population of constitutively expressed NLRs in the organ or other part of the plant.

[0009] The present invention further provides methods for identifying an R gene that is capable of conferring to a plant resistance to a plant pathogen of interest. Such methods comprise contacting a transgenic plant comprising a candidate R gene or a collection of transgenic plants each comprising a candidate R gene with the plant pathogen of interest. The candidate R genes are from a library of candidate R genes produced as describe above. Each of such transgenic plants can be produced by transforming a host plant with a candidate R gene. The host plant is a host (i.e. susceptible plant) for the plant pathogen of interest. That is, the plant pathogen is capable of causing plant disease symptoms on the host plant under suitable environment conditions. The methods further comprise contacting the transgenic plant(s) with, or otherwise exposing the transgenic plant(s) to, the plant pathogen of interest under environmental conditions suitable for the development of disease symptoms on a susceptible plant and determining if a transgenic plant displays enhanced resistance to the plant pathogen of interest when compared to a control host plant that does not comprise the candidate NLR gene. Candidate NLR genes that confer to such a transgenic plant resistance to plant disease symptoms caused by the plant pathogen of interest are identified as functional NLR genes.

[0010] Further provided are libraries comprising candidate NLR genes, collections of transgenic plants comprising candidate NLR genes, nucleic molecules comprising one or more NLR genes identified according the methods of the present invention and plants, plant cells, and other host cells comprising one or more such NLR genes.

### BRIEF DESCRIPTION OF THE DRAWINGS

[0011] FIG. 1 is a graphical representation of transcript abundance of NLRs from the de novo assembled transcriptome of barley (Hordeum vulgare) accession Golden Promise. Transcript abundance was estimated from self-aligned RNAseq data measured in transcripts per million (TPM). The expression of two functional resistance genes, Rps6 and Rps7.a (Mla8), to wheat stripe rust (Puccinia striiformis f. sp. tritici) is shown.

[0012] FIG. 2 is a graphical representation of transcript abundance of NLRs from the de novo assembled transcriptome of barley (Hordeum vulgare) accession CI 16147. Transcript abundance was estimated from self-aligned RNAseq data measured in transcripts per million (TPM). The expression of the functional resistance gene Rps7.b (Mla7) to wheat stripe rust (Puccinia striiformis f. sp. tritici) is shown.

[0013] FIG. 3 is a graphical representation of transcript abundance of NLRs from the de novo assembled transcriptome of barley (Hordeum vulgare) accession CI 16153. Transcript abundance was estimated from self-aligned RNAseq data measured in transcripts per million (TPM). The expression of the functional resistance gene Rps7.b (Mla7) to wheat stripe rust (Puccinia striiformis f. sp. tritici) is shown.

[0014] FIG. 4 is a graphical representation of transcript abundance of NLRs from the de novo assembled transcriptome of pigeon pea (Cajanus cajan) accession G119-99. Transcript abundance was estimated from self-aligned RNAseq data measured in transcripts per million (TPM). The expression of the functional resistance gene Rpp1 to Asian soybean rust (Phakopsora pachyrhizi) is shown.

[0015] FIG. 5 is a graphical representation of transcript abundance of NLRs from the de novo assembled transcriptome of Arabidopsis thaliana accession Col-0. Transcript abundance was estimated from self-aligned RNAseq data measured in transcripts per million (TPM). The expression of the functional resistance genes RPP1, RPP4, RPP5, RPP7, and RPP8 to downy mildew (Hyaloperonospora arabidopsidis), WRR4 to white rust (Albugo candida), and ZAR1 to Pseudomonas syringae are shown.

[0016] FIG. 6 is a graphical representation of transcript abundance of NLRs from the de novo assembled transcriptome of Aegilops tauschii accession KU2025. Transcript abundance was estimated from self-aligned RNAseq data measured in transcripts per million (TPM). The expression of the functional resistance gene Sr46 to wheat stem rust (Puccinia graminis f. sp. tritici) is shown.

[0017] FIG. 7 is a graphical representation of transcript abundance of NLRs from the de novo assembled transcriptome of Aegilops tauschii accession KU2075. Transcript abundance was estimated from self-aligned RNAseq data measured in transcripts per million (TPM). The expression of the functional resistance gene Sr46 to wheat stem rust (Puccinia graminis f. sp. tritici) is shown.

[0018] FIG. 8 is a graphical representation of transcript abundance of NLRs from the de novo assembled transcriptome of Aegilops tauschii accession KU2078. Transcript abundance was estimated from self-aligned RNAseq data measured in transcripts per million (TPM). The expression of the functional resistance gene Sr46 and SrTA1662 to wheat stem rust (Puccinia graminis f. sp. tritici) is shown.

[0019] FIG. 9 is a graphical representation of transcript abundance of NLRs from the de novo assembled transcriptome of Aegilops tauschii accession KU2093. Transcript abundance was estimated from self-aligned RNAseq data measured in transcripts per million (TPM). The expression of the functional resistance gene Sr46 to wheat stem rust (Puccinia graminis f. sp. tritici) is shown.

[0020] FIG. 10 is a graphical representation of transcript abundance of NLRs from the de novo assembled transcriptome of Aegilops tauschii accession KU2124. Transcript abundance was estimated from self-aligned RNAseq data measured in transcripts per million (TPM). The expression of the functional resistance gene Sr45 to wheat stem rust (Puccinia graminis f. sp. tritici) is shown.

[0021] FIG. 11 is a graphical representation of transcript abundance of NLRs from the de novo assembled transcriptome of Aegilops tauschii accession PI 499262. Transcript abundance was estimated from self-aligned RNAseq data measured in transcripts per million (TPM). The expression of the functional resistance gene Sr46 to wheat stem rust (Puccinia graminis f. sp. tritici) is shown.

[0022] FIG. 12 is a graphical representation of transcript abundance of NLRs from the de novo assembled transcriptome of Arabidopsis thaliana accession Ler-0 seedlings. Transcript abundance was estimated from self-aligned RNAseq data measured in transcripts per million (TPM). The expression of the functional resistance genes RPP1, RPP5, RPP7, and RPP8 to late blight (Hyaloperonospora arabidopsidis) and WRR4, WRR8, and WRR9 white rust (Albugo candida), are shown.

[0023] FIG. 13 is a graphical representation of transcript abundance of NLRs from the de novo assembled transcriptome of Arabidopsis thaliana accession Sf-2 seedlings. Transcript abundance was estimated from self-aligned RNAseq data measured in transcripts per million (TPM). The expression of the functional resistance genes RPP1, RPP5, RPP7, and RPP8 to late blight (Hyaloperonospora arabidopsidis), WRR8 and WRR9 to white rust (Albugo candida), and an allele of RLM3 to grey mould (Botrytis cinerea), dark leaf spot of cabbage (Alternaria brassicicola) and dark spot of crucifers (Alternaria brassicae) is shown.

[0024] FIG. 14 is a graphical representation of transcript abundance of NLRs from the de novo assembled transcriptome of Arabidopsis thaliana accession Ws-0 seedlings. Transcript abundance was estimated from self-aligned RNAseq data measured in transcripts per million (TPM). The expression of the functional resistance genes RPP1, RPP5, RPP7, and RPP8 to late blight (Hyaloperonospora arabidopsidis), WRR8 and WRR9 to white rust (Albugo candida), and an allele of RLM3 to grey mould (Botrytis cinerea), dark leaf spot of cabbage (Alternaria brassicicola) and dark spot of crucifers (Alternaria brassicae) is shown.

[0025] FIG. 15 is a graphical representation of transcript abundance of NLRs from the de novo assembled transcriptome of Solanum americanum accession 2273. Transcript abundance was estimated from self-aligned RNAseq data measured in transcripts per million (TPM). The expression of the functional resistance gene Rpi-amr1e to late blight (Phytophthora infestans) is shown.

[0026] FIG. 16 is a graphical representation of transcript abundance of NLRs from the de novo assembled transcriptome of Solanum lycopersicum cultivar Motelle leaf tissue. Transcript abundance was estimated from self-aligned RNAseq data measured in transcripts per million (TPM). The expression of the functional resistance gene Mi-1.2 to root-knot nematodes (Meloidogyne spp.), the potato aphid (Macrosiphum euphorbiae), and the sweet potato whitefly (Bemisia tabaci) is shown.

[0027] FIG. 17 is a graphical representation of transcript abundance of NLRs from the de novo assembled transcriptome of Solanum lycopersicum cultivar Motelle root tissue. Transcript abundance was estimated from self-aligned RNAseq data measured in transcripts per million (TPM). The expression of the functional resistance gene Mi-1.2 to root-knot nematodes (Meloidogyne spp.), the potato aphid (Macrosiphum euphorbiae), and the sweet potato whitefly (Bemisia tabaci) is shown.

[0028] FIG. 18 is a graphical representation of transcript abundance of NLRs from the de novo assembled transcriptome of Solanum lycopersicum cultivar VENT Cherry leaf tissue. Transcript abundance was estimated from self-aligned RNAseq data measured in transcripts per million (TPM). The expression of the functional resistance gene Tm-2 to tobamoviruses including Tomato Mosaic Virus (ToMV) and Tobacco Mosaic Virus (TMV) and Mi-1.2 to root-knot nematodes (Meloidogyne spp.), the potato aphid (Macrosiphum euphorbiae), and the sweet potato whitefly (Bemisia tabaci) is shown.

[0029] FIG. 19 is a graphical representation of transcript abundance of NLRs from the de novo assembled transcriptome of Solanum lycopersicum cultivar VENT Cherry root tissue. Transcript abundance was estimated from self-aligned RNAseq data measured in transcripts per million (TPM). The expression of the functional resistance gene Tm-2 to tobamoviruses including Tomato Mosaic Virus (ToMV) and Tobacco Mosaic Virus (TMV) and Mi-1.2 to root-knot nematodes (Meloidogyne spp.), the potato aphid (Macrosiphum euphorbiae), and the sweet potato whitefly (Bemisia tabaci) is shown.

### SEQUENCE LISTING

[0030] The nucleotide and amino acid sequences listed in the accompanying sequence listing are shown using standard letter abbreviations for nucleotide bases, and three-letter code for amino acids. The nucleotide sequences follow the standard convention of beginning at the 5′ end of the sequence and proceeding forward (i.e., from left to right in each line) to the 3′ end. Only one strand of each nucleotide sequence is shown, but the complementary strand is understood to be included by any reference to the displayed strand. The amino acid sequences follow the standard convention of beginning at the amino terminus of the sequence and proceeding forward (i.e., from left to right in each line) to the carboxy terminus.

[0031] SEQ ID NO: 1 sets forth the nucleotide sequence of the coding region of the cDNA of Dk_04_40, an NLR from Aegilops longissima. If desired, a stop codon (e.g. TAA, TAG, or TGA) can be operably linked to the 3′ end of a nucleic acid molecule comprising or consisting of SEQ ID NO: 1. The native stop codon of this cDNA is TAA.

[0032] SEQ ID NO: 2 sets forth the amino acid sequence of the NLR protein encoded by Dk_04_40 (SEQ ID NO: 1).

[0033] SEQ ID NO: 3 sets forth the nucleotide sequence of the coding region of the cDNA of Dk_01_03, an NLR from Aegilops sharonensis. If desired, a stop codon (e.g. TAA, TAG, or TGA) can be operably linked to the 3′ end of a nucleic acid molecule comprising or consisting of SEQ ID NO: 3. The native stop codon of this cDNA is TGA.

[0034] SEQ ID NO: 4 sets forth the amino acid sequence of the NLR protein encoded by Dk_01_03 (SEQ ID NO: 3).

[0035] SEQ ID NO: 5 sets forth the nucleotide sequence of the coding region of the cDNA of Dk_01_04, an NLR from Aegilops sharonensis. If desired, a stop codon (e.g. TAA, TAG, or TGA) can be operably linked to the 3′ end of a nucleic acid molecule comprising or consisting of SEQ ID NO: 5. The native stop codon of this cDNA is TGA.

[0036] SEQ ID NO: 6 sets forth the amino acid sequence of the NLR protein encoded by Dk_01_04 (SEQ ID NO: 5).

[0037] SEQ ID NO: 7 sets forth the nucleotide sequence of the coding region of the cDNA of Dk_01_06, an NLR from Aegilops sharonensis. If desired, a stop codon (e.g. TAA, TAG, or TGA) can be operably linked to the 3′ end of a nucleic acid molecule comprising or consisting of SEQ ID NO: 7. The native stop codon of this cDNA is TAG.

[0038] SEQ ID NO: 8 sets forth the amino acid sequence of the NLR protein encoded by Dk_01_06 (SEQ ID NO: 7).

[0039] SEQ ID NO: 9 sets forth the nucleotide sequence of the coding region of the cDNA of Dk_01_31, an NLR from Aegilops sharonensis. If desired, a stop codon (e.g. TAA, TAG, or TGA) can be operably linked to the 3′ end of a nucleic acid molecule comprising or consisting of SEQ ID NO: 9. The native stop codon of this cDNA is TAA.

[0040] SEQ ID NO: 10 sets forth the amino acid sequence of the NLR protein encoded by Dk_01_31 (SEQ ID NO: 9).

[0041] SEQ ID NO: 11 sets forth the nucleotide sequence of the coding region of the cDNA of Dk_01_33, an NLR from Aegilops sharonensis. If desired, a stop codon (e.g. TAA, TAG, or TGA) can be operably linked to the 3′ end of a nucleic acid molecule comprising or consisting of SEQ ID NO: 11. The native stop codon of this cDNA is TGA.

[0042] SEQ ID NO: 12 sets forth the amino acid sequence of the NLR protein encoded by Dk_01_33 (SEQ ID NO: 11).

[0043] SEQ ID NO: 13 sets forth the nucleotide sequence of the coding region of the cDNA of Dk_01_34, an NLR from Aegilops sharonensis. If desired, a stop codon (e.g. TAA, TAG, or TGA) can be operably linked to the 3′ end of a nucleic acid molecule comprising or consisting of SEQ ID NO: 13. The native stop codon of this cDNA is TGA.

[0044] SEQ ID NO: 14 sets forth the amino acid sequence of the NLR protein encoded by Dk_01_34 (SEQ ID NO: 13).

[0045] SEQ ID NO: 15 sets forth the nucleotide sequence of the coding region of the cDNA of Dk_01_92, an NLR from Holcus lanatus. If desired, a stop codon (e.g. TAA, TAG, or TGA) can be operably linked to the 3′ end of a nucleic acid molecule comprising or consisting of SEQ ID NO: 15. The native stop codon of this cDNA is TAG.

[0046] SEQ ID NO: 16 sets forth the amino acid sequence of the NLR protein encoded by Dk_01_92 (SEQ ID NO: 15).

[0047] SEQ ID NO: 17 sets forth the nucleotide sequence of the coding region of the cDNA of Dk_02_27, an NLR from Koeleria macrantha. If desired, a stop codon (e.g. TAA, TAG, or TGA) can be operably linked to the 3′ end of a nucleic acid molecule comprising or consisting of SEQ ID NO: 17. The native stop codon of this cDNA is TAA.

[0048] SEQ ID NO: 18 sets forth the amino acid sequence of the NLR protein encoded by Dk_02_27 (SEQ ID NO: 17).

[0049] SEQ ID NO: 19 sets forth the nucleotide sequence of the coding region of the cDNA of Dk_02_28, an NLR from Koeleria macrantha. If desired, a stop codon (e.g. TAA, TAG, or TGA) can be operably linked to the 3′ end of a nucleic acid molecule comprising or consisting of SEQ ID NO: 19. The native stop codon of this cDNA is TAG.

[0050] SEQ ID NO: 20 sets forth the amino acid sequence of the NLR protein encoded by Dk_02_28 (SEQ ID NO: 19).

[0051] SEQ ID NO: 21 sets forth the nucleotide sequence of the coding region of the cDNA of Dk_02_49, an NLR from Koeleria macrantha. If desired, a stop codon (e.g. TAA, TAG, or TGA) can be operably linked to the 3′ end of a nucleic acid molecule comprising or consisting of SEQ ID NO: 21. The native stop codon of this cDNA is TAA.

[0052] SEQ ID NO: 22 sets forth the amino acid sequence of the NLR protein encoded by Dk_02_49 (SEQ ID NO: 21).

[0053] SEQ ID NO: 23 sets forth the nucleotide sequence of the coding region of the cDNA of Dk_03_76, an NLR from Koeleria macrantha. If desired, a stop codon (e.g. TAA, TAG, or TGA) can be operably linked to the 3′ end of a nucleic acid molecule comprising or consisting of SEQ ID NO: 23. The native stop codon of this cDNA is TGA.

[0054] SEQ ID NO: 24 sets forth the amino acid sequence of the NLR protein encoded by Dk_03_76 (SEQ ID NO: 23).

[0055] SEQ ID NO: 25 sets forth the nucleotide sequence of the coding region of the cDNA of Dk_01_19, an NLR from Aegilops sharonensis. If desired, a stop codon (e.g. TAA, TAG, or TGA) can be operably linked to the 3′ end of a nucleic acid molecule comprising or consisting of SEQ ID NO: 25. The native stop codon of this cDNA is TGA.

[0056] SEQ ID NO: 26 sets forth the amino acid sequence of the NLR protein encoded by Dk_01_19 (SEQ ID NO: 25).

[0057] SEQ ID NO: 27 sets forth the nucleotide sequence of the Gateway adapter attB1.

[0058] SEQ ID NO: 28 sets forth the nucleotide sequence of the Gateway adapter attB2.

[0059] SEQ ID NO: 29 sets forth the nucleotide sequence of the coding region of the cDNA of Dk_01_35, an NLR from Aegilops sharonensis. If desired, a stop codon (e.g. TAA, TAG, or TGA) can be operably linked to the 3′ end of a nucleic acid molecule comprising or consisting of this NLR sequence. The native stop codon of this cDNA is TGA.

[0060] SEQ ID NO: 30 sets forth the amino acid sequence of the NLR protein encoded by SEQ ID NO: 29.

[0061] SEQ ID NO: 31 sets forth the nucleotide sequence of the coding region of the cDNA of Dk_01_55, an NLR from Aegilops sharonensis. If desired, a stop codon (e.g. TAA, TAG, or TGA) can be operably linked to the 3′ end of a nucleic acid molecule comprising or consisting of this NLR sequence. The native stop codon of this cDNA is TGA.

[0062] SEQ ID NO: 32 sets forth the amino acid sequence of the NLR protein encoded by SEQ ID NO: 31.

[0063] SEQ ID NO: 33 sets forth the nucleotide sequence of the coding region of the cDNA of Dk_01_57, an NLR from Aegilops sharonensis. If desired, a stop codon (e.g. TAA, TAG, or TGA) can be operably linked to the 3′ end of a nucleic acid molecule comprising or consisting of this NLR sequence. The native stop codon of this cDNA is TGA.

[0064] SEQ ID NO: 34 sets forth the amino acid sequence of the NLR protein encoded by SEQ ID NO: 33.

[0065] SEQ ID NO: 35 sets forth the nucleotide sequence of the coding region of the cDNA of Dk_01_59, an NLR from Aegilops sharonensis. If desired, a stop codon (e.g. TAA, TAG, or TGA) can be operably linked to the 3′ end of a nucleic acid molecule comprising or consisting of this NLR sequence. The native stop codon of this cDNA is TAA.

[0066] SEQ ID NO: 36 sets forth the amino acid sequence of the NLR protein encoded by SEQ ID NO: 35.

[0067] SEQ ID NO: 37 sets forth the nucleotide sequence of the coding region of the cDNA of Dk_01_60, an NLR from Aegilops sharonensis. If desired, a stop codon (e.g. TAA, TAG, or TGA) can be operably linked to the 3′ end of a nucleic acid molecule comprising or consisting of this NLR sequence. The native stop codon of this cDNA is TAG.

[0068] SEQ ID NO: 38 sets forth the amino acid sequence of the NLR protein encoded by SEQ ID NO: 37)

[0069] SEQ ID NO: 39 sets forth the nucleotide sequence of the coding region of the cDNA of Dk_01_61, an NLR from Cynosurus cristatus. If desired, a stop codon (e.g. TAA, TAG, or TGA) can be operably linked to the 3′ end of a nucleic acid molecule comprising or consisting of this NLR sequence. The native stop codon of this cDNA is TAA.

[0070] SEQ ID NO: 40 sets forth the amino acid sequence of the NLR protein encoded by SEQ ID NO: 39.

[0071] SEQ ID NO: 41 sets forth the nucleotide sequence of the coding region of the cDNA of Dk_01_62, an NLR from Cynosurus cristatus. If desired, a stop codon (e.g. TAA, TAG, or TGA) can be operably linked to the 3′ end of a nucleic acid molecule comprising or consisting of this NLR sequence. The native stop codon of this cDNA is TGA.

[0072] SEQ ID NO: 42 sets forth the amino acid sequence of the NLR protein encoded by SEQ ID NO: 41.

[0073] SEQ ID NO: 43 sets forth the nucleotide sequence of the coding region of the cDNA of Dk_01_64, an NLR from Cynosurus cristatus. If desired, a stop codon (e.g. TAA, TAG, or TGA) can be operably linked to the 3′ end of a nucleic acid molecule comprising or consisting of this NLR sequence. The native stop codon of this cDNA is TGA.

[0074] SEQ ID NO: 44 sets forth the amino acid sequence of the NLR protein encoded by SEQ ID NO: 43.

[0075] SEQ ID NO: 45 sets forth the nucleotide sequence of the coding region of the cDNA of Dk_01_68, an NLR from Cynosurus cristatus. If desired, a stop codon (e.g. TAA, TAG, or TGA) can be operably linked to the 3′ end of a nucleic acid molecule comprising or consisting of this NLR sequence. The native stop codon of this cDNA is TGA.

[0076] SEQ ID NO: 46 sets forth the amino acid sequence of the NLR protein encoded by SEQ ID NO: 45.

[0077] SEQ ID NO: 47 sets forth the nucleotide sequence of the coding region of the cDNA of Dk_02_02, an NLR from Koeleria macrantha. If desired, a stop codon (e.g. TAA, TAG, or TGA) can be operably linked to the 3′ end of a nucleic acid molecule comprising or consisting of this NLR sequence. The native stop codon of this cDNA is TAG.

[0078] SEQ ID NO: 48 sets forth the amino acid sequence of the NLR protein encoded by SEQ ID NO: 47.

[0079] SEQ ID NO: 49 sets forth the nucleotide sequence of the coding region of the cDNA of Dk_02_03, an NLR from Koeleria macrantha. If desired, a stop codon (e.g. TAA, TAG, or TGA) can be operably linked to the 3′ end of a nucleic acid molecule comprising or consisting of this NLR sequence. The native stop codon of this cDNA is TAA.

[0080] SEQ ID NO: 50 sets forth the amino acid sequence of the NLR protein encoded by SEQ ID NO: 49.

[0081] SEQ ID NO: 51 sets forth the nucleotide sequence of the coding region of the cDNA of Dk_02_06, an NLR from Koeleria macrantha. If desired, a stop codon (e.g. TAA, TAG, or TGA) can be operably linked to the 3′ end of a nucleic acid molecule comprising or consisting of this NLR sequence. The native stop codon of this cDNA is TAG.

[0082] SEQ ID NO: 52 sets forth the amino acid sequence of the NLR protein encoded by SEQ ID NO: 51.

[0083] SEQ ID NO: 53 sets forth the nucleotide sequence of the coding region of the cDNA of Dk_02_07, an NLR from Koeleria macrantha. If desired, a stop codon (e.g. TAA, TAG, or TGA) can be operably linked to the 3′ end of a nucleic acid molecule comprising or consisting of this NLR sequence. The native stop codon of this cDNA is TAA.

[0084] SEQ ID NO: 54 sets forth the amino acid sequence of the NLR protein encoded by SEQ ID NO: 53.

[0085] SEQ ID NO: 55 sets forth the nucleotide sequence of the coding region of the cDNA of Dk_02_08, an NLR from Koeleria macrantha. If desired, a stop codon (e.g. TAA, TAG, or TGA) can be operably linked to the 3′ end of a nucleic acid molecule comprising or consisting of this NLR sequence. The native stop codon of this cDNA is TAG.

[0086] SEQ ID NO: 56 sets forth the amino acid sequence of the NLR protein encoded by SEQ ID NO: 55.

[0087] SEQ ID NO: 57 sets forth the nucleotide sequence of the coding region of the cDNA of Dk_02_11, an NLR from Koeleria macrantha. If desired, a stop codon (e.g. TAA, TAG, or TGA) can be operably linked to the 3′ end of a nucleic acid molecule comprising or consisting of this NLR sequence. The native stop codon of this cDNA is TAA.

[0088] SEQ ID NO: 58 sets forth the amino acid sequence of the NLR protein encoded by SEQ ID NO: 57.

[0089] SEQ ID NO: 59 sets forth the nucleotide sequence of the coding region of the cDNA of Dk_02_13, an NLR from Koeleria macrantha. If desired, a stop codon (e.g. TAA, TAG, or TGA) can be operably linked to the 3′ end of a nucleic acid molecule comprising or consisting of this NLR sequence. The native stop codon of this cDNA is TGA.

[0090] SEQ ID NO: 60 sets forth the amino acid sequence of the NLR protein encoded by SEQ ID NO: 59.

[0091] SEQ ID NO: 61 sets forth the nucleotide sequence of the coding region of the cDNA of Dk_02_14, an NLR from Koeleria macrantha. If desired, a stop codon (e.g. TAA, TAG, or TGA) can be operably linked to the 3′ end of a nucleic acid molecule comprising or consisting of this NLR sequence. The native stop codon of this cDNA is TGA.

[0092] SEQ ID NO: 62 sets forth the amino acid sequence of the NLR protein encoded by SEQ ID NO: 61.

[0093] SEQ ID NO: 63 sets forth the nucleotide sequence of the coding region of the cDNA of Dk_02_19, an NLR from Koeleria macrantha. If desired, a stop codon (e.g. TAA, TAG, or TGA) can be operably linked to the 3′ end of a nucleic acid molecule comprising or consisting of this NLR sequence. The native stop codon of this cDNA is TAG.

[0094] SEQ ID NO: 64 sets forth the amino acid sequence of the NLR protein encoded by SEQ ID NO: 63.

[0095] SEQ ID NO: 65 sets forth the nucleotide sequence of the coding region of the cDNA of Dk_02_20, an NLR from Koeleria macrantha. If desired, a stop codon (e.g. TAA, TAG, or TGA) can be operably linked to the 3′ end of a nucleic acid molecule comprising or consisting of this NLR sequence. The native stop codon of this cDNA is TGA.

[0096] SEQ ID NO: 66 sets forth the amino acid sequence of the NLR protein encoded by SEQ ID NO: 65.

[0097] SEQ ID NO: 67 sets forth the nucleotide sequence of the coding region of the cDNA of Dk_02_25, an NLR from Koeleria macrantha. If desired, a stop codon (e.g. TAA, TAG, or TGA) can be operably linked to the 3′ end of a nucleic acid molecule comprising or consisting of this NLR sequence. The native stop codon of this cDNA is TGA.

[0098] SEQ ID NO: 68 sets forth the amino acid sequence of the NLR protein encoded by SEQ ID NO: 67.

[0099] SEQ ID NO: 69 sets forth the nucleotide sequence of the coding region of the cDNA of Dk_02_34, an NLR from Koeleria macrantha. If desired, a stop codon (e.g. TAA, TAG, or TGA) can be operably linked to the 3′ end of a nucleic acid molecule comprising or consisting of this NLR sequence. The native stop codon of this cDNA is TAG.

[0100] SEQ ID NO: 70 sets forth the amino acid sequence of the NLR protein encoded by SEQ ID NO: 69.

[0101] SEQ ID NO: 71 sets forth the nucleotide sequence of the coding region of the cDNA of Dk_02_35, an NLR from Koeleria macrantha. If desired, a stop codon (e.g. TAA, TAG, or TGA) can be operably linked to the 3′ end of a nucleic acid molecule comprising or consisting of this NLR sequence. The native stop codon of this cDNA is TGA.

[0102] SEQ ID NO: 72 sets forth the amino acid sequence of the NLR protein encoded by SEQ ID NO: 71.

[0103] SEQ ID NO: 73 sets forth the nucleotide sequence of the coding region of the cDNA of Dk_02_36, an NLR from Koeleria macrantha. If desired, a stop codon (e.g. TAA, TAG, or TGA) can be operably linked to the 3′ end of a nucleic acid molecule comprising or consisting of this NLR sequence. The native stop codon of this cDNA is TAA.

[0104] SEQ ID NO: 74 sets forth the amino acid sequence of the NLR protein encoded by SEQ ID NO: 73.

[0105] SEQ ID NO: 75 sets forth the nucleotide sequence of the coding region of the cDNA of Dk_02_38, an NLR from Koeleria macrantha. If desired, a stop codon (e.g. TAA, TAG, or TGA) can be operably linked to the 3′ end of a nucleic acid molecule comprising or consisting of this NLR sequence. The native stop codon of this cDNA is TGA,

[0106] SEQ ID NO: 76 sets forth the amino acid sequence of the NLR protein encoded by SEQ ID NO: 75.

[0107] SEQ ID NO: 77 sets forth the nucleotide sequence of the coding region of the cDNA of Dk_02_39, an NLR from Koeleria macrantha. If desired, a stop codon (e.g. TAA, TAG, or TGA) can be operably linked to the 3′ end of a nucleic acid molecule comprising or consisting of this NLR sequence. The native stop codon of this cDNA is TAA.

[0108] SEQ ID NO: 78 sets forth the amino acid sequence of the NLR protein encoded by SEQ ID NO: 77.

[0109] SEQ ID NO: 79 sets forth the nucleotide sequence of the coding region of the cDNA of Dk_02_42, an NLR from Koeleria macrantha. If desired, a stop codon (e.g. TAA, TAG, or TGA) can be operably linked to the 3′ end of a nucleic acid molecule comprising or consisting of this NLR sequence. The native stop codon of this cDNA is TGA.

[0110] SEQ ID NO: 80 sets forth the amino acid sequence of the NLR protein encoded by SEQ ID NO: 79.

[0111] SEQ ID NO: 81 sets forth the nucleotide sequence of the coding region of the cDNA of Dk_02_44, an NLR from Koeleria macrantha. If desired, a stop codon (e.g. TAA, TAG, or TGA) can be operably linked to the 3′ end of a nucleic acid molecule comprising or consisting of this NLR sequence. The native stop codon of this cDNA is TAA.

[0112] SEQ ID NO: 82 sets forth the amino acid sequence of the NLR protein encoded by SEQ ID NO: 81.

[0113] SEQ ID NO: 83 sets forth the nucleotide sequence of the coding region of the cDNA of Dk_02_46, an NLR from Koeleria macrantha. If desired, a stop codon (e.g. TAA, TAG, or TGA) can be operably linked to the 3′ end of a nucleic acid molecule comprising or consisting of this NLR sequence. The native stop codon of this cDNA is TGA.

[0114] SEQ ID NO: 84 sets forth the amino acid sequence of the NLR protein encoded by SEQ ID NO: 83.

[0115] SEQ ID NO: 85 sets forth the nucleotide sequence of the coding region of the cDNA of Dk_03_13, an NLR from Cynosurus cristatus. If desired, a stop codon (e.g. TAA, TAG, or TGA) can be operably linked to the 3′ end of a nucleic acid molecule comprising or consisting of this NLR sequence. The native stop codon of this cDNA is TGA.

[0116] SEQ ID NO: 86 sets forth the amino acid sequence of the NLR protein encoded by SEQ ID NO: 85.

[0117] SEQ ID NO: 87 sets forth the nucleotide sequence of the coding region of the cDNA of Dk_03_16, an NLR from Cynosurus cristatus. If desired, a stop codon (e.g. TAA, TAG, or TGA) can be operably linked to the 3′ end of a nucleic acid molecule comprising or consisting of this NLR sequence. The native stop codon of this cDNA is TAA.

[0118] SEQ ID NO: 88 sets forth the amino acid sequence of the NLR protein encoded by SEQ ID NO: 87.

[0119] SEQ ID NO: 89 sets forth the nucleotide sequence of the coding region of the cDNA of Dk_03_19, an NLR from Cynosurus cristatus. If desired, a stop codon (e.g. TAA, TAG, or TGA) can be operably linked to the 3′ end of a nucleic acid molecule comprising or consisting of this NLR sequence. The native stop codon of this cDNA is TAG.

[0120] SEQ ID NO: 90 sets forth the amino acid sequence of the NLR protein encoded by SEQ ID NO: 89.

[0121] SEQ ID NO: 91 sets forth the nucleotide sequence of the coding region of the cDNA of Dk_03_48, an NLR from Holcus lanatus. If desired, a stop codon (e.g. TAA, TAG, or TGA) can be operably linked to the 3′ end of a nucleic acid molecule comprising or consisting of this NLR sequence. The native stop codon of this cDNA is TAA.

[0122] SEQ ID NO: 92 sets forth the amino acid sequence of the NLR protein encoded by SEQ ID NO: 91.

[0123] SEQ ID NO: 93 sets forth the nucleotide sequence of the coding region of the cDNA of Dk_03_58, an NLR from Koeleria macrantha. If desired, a stop codon (e.g. TAA, TAG, or TGA) can be operably linked to the 3′ end of a nucleic acid molecule comprising or consisting of this NLR sequence. The native stop codon of this cDNA is TAA.

[0124] SEQ ID NO: 94 sets forth the amino acid sequence of the NLR protein encoded by SEQ ID NO: 93.

[0125] SEQ ID NO: 95 sets forth the nucleotide sequence of the coding region of the cDNA of Dk_03_60, an NLR from Koeleria macrantha. If desired, a stop codon (e.g. TAA, TAG, or TGA) can be operably linked to the 3′ end of a nucleic acid molecule comprising or consisting of this NLR sequence. The native stop codon of this cDNA is TGA.

[0126] SEQ ID NO: 96 sets forth the amino acid sequence of the NLR protein encoded by SEQ ID NO: 95.

[0127] SEQ ID NO: 97 sets forth the nucleotide sequence of the coding region of the cDNA of Dk_04_34, an NLR from Hordeum vulgare. If desired, a stop codon (e.g. TAA, TAG, or TGA) can be operably linked to the 3′ end of a nucleic acid molecule comprising or consisting of this NLR sequence. The native stop codon of this cDNA is TAG.

[0128] SEQ ID NO: 98 sets forth the amino acid sequence of the NLR protein encoded by SEQ ID NO: 97.

[0129] SEQ ID NO: 99 sets forth the nucleotide sequence of the coding region of the cDNA of Dk_04_44, an NLR from Aegilops bicornis. If desired, a stop codon (e.g. TAA, TAG, or TGA) can be operably linked to the 3′ end of a nucleic acid molecule comprising or consisting of this NLR sequence. The native stop codon of this cDNA is TGA.

[0130] SEQ ID NO: 100 sets forth the amino acid sequence of the NLR protein encoded by SEQ ID NO: 99.

[0131] SEQ ID NO: 101 sets forth the nucleotide sequence of the coding region of the cDNA of Dk_04_85, an NLR from Aegilops bicornis. If desired, a stop codon (e.g. TAA, TAG, or TGA) can be operably linked to the 3′ end of a nucleic acid molecule comprising or consisting of this NLR sequence. The native stop codon of this cDNA is TAA.

[0132] SEQ ID NO: 102 sets forth the amino acid sequence of the NLR protein encoded by SEQ ID NO: 101.

[0133] SEQ ID NO: 103 sets forth the nucleotide sequence of the coding region of the cDNA of Dk_04_88, an NLR from Aegilops bicornis. If desired, a stop codon (e.g. TAA, TAG, or TGA) can be operably linked to the 3′ end of a nucleic acid molecule comprising or consisting of this NLR sequence. The native stop codon of this cDNA is TGA.

[0134] SEQ ID NO: 104 sets forth the amino acid sequence of the NLR protein encoded by SEQ ID NO: 103.

[0135] SEQ ID NO: 105 sets forth the nucleotide sequence of the coding region of the cDNA of Dk_04_92, an NLR from Aegilops bicornis. If desired, a stop codon (e.g. TAA, TAG, or TGA) can be operably linked to the 3′ end of a nucleic acid molecule comprising or consisting of this NLR sequence. The native stop codon of this cDNA is TGA.

[0136] SEQ ID NO: 106 sets forth the amino acid sequence of the NLR protein encoded by SEQ ID NO: 105.

[0137] SEQ ID NO: 107 sets forth the nucleotide sequence of the coding region of the cDNA of Dk_04_95, an NLR from Aegilops bicornis. If desired, a stop codon (e.g. TAA, TAG, or TGA) can be operably linked to the 3′ end of a nucleic acid molecule comprising or consisting of this NLR sequence. The native stop codon of this cDNA is TAA.

[0138] SEQ ID NO: 108 sets forth the amino acid sequence of the NLR protein encoded by SEQ ID NO: 107.

[0139] SEQ ID NO: 109 sets forth the nucleotide sequence of the coding region of the cDNA of Dk_04_96, an NLR from Aegilops bicornis. If desired, a stop codon (e.g. TAA, TAG, or TGA) can be operably linked to the 3′ end of a nucleic acid molecule comprising or consisting of this NLR sequence. The native stop codon of this cDNA is TGA.

[0140] SEQ ID NO: 110 sets forth the amino acid sequence of the NLR protein encoded by SEQ ID NO: 109.

[0141] SEQ ID NO: 111 sets forth the nucleotide sequence of the coding region of the cDNA of Dk_05_11, an NLR from Aegilops longissima. If desired, a stop codon (e.g. TAA, TAG, or TGA) can be operably linked to the 3′ end of a nucleic acid molecule comprising or consisting of this NLR sequence. The native stop codon of this cDNA is TGA.

[0142] SEQ ID NO: 112 sets forth the amino acid sequence of the NLR protein encoded by SEQ ID NO: 111.

[0143] SEQ ID NO: 113 sets forth the nucleotide sequence of the coding region of the cDNA of Dk_05_14, an NLR from Aegilops longissima. If desired, a stop codon (e.g. TAA, TAG, or TGA) can be operably linked to the 3′ end of a nucleic acid molecule comprising or consisting of this NLR sequence. The native stop codon of this cDNA is TAA.

[0144] SEQ ID NO: 114 sets forth the amino acid sequence of the NLR protein encoded by SEQ ID NO: 113.

[0145] SEQ ID NO: 115 sets forth the nucleotide sequence of the coding region of the cDNA of Dk_05_15, an NLR from Aegilops longissima. If desired, a stop codon (e.g. TAA, TAG, or TGA) can be operably linked to the 3′ end of a nucleic acid molecule comprising or consisting of this NLR sequence. The native stop codon of this cDNA is TGA.

[0146] SEQ ID NO: 116 sets forth the amino acid sequence of the NLR protein encoded by SEQ ID NO: 115.

[0147] SEQ ID NO: 117 sets forth the nucleotide sequence of the coding region of the cDNA of Dk_05_16, an NLR from Aegilops longissima. If desired, a stop codon (e.g. TAA, TAG, or TGA) can be operably linked to the 3′ end of a nucleic acid molecule comprising or consisting of this NLR sequence. The native stop codon of this cDNA is TGA.

[0148] SEQ ID NO: 118 sets forth the amino acid sequence of the NLR protein encoded by SEQ ID NO: 117.

[0149] SEQ ID NO: 119 sets forth the nucleotide sequence of the coding region of the cDNA of Dk_05_24, an NLR from Aegilops longissima. If desired, a stop codon (e.g. TAA, TAG, or TGA) can be operably linked to the 3′ end of a nucleic acid molecule comprising or consisting of this NLR sequence. The native stop codon of this cDNA is TAA.

[0150] SEQ ID NO: 120 sets forth the amino acid sequence of the NLR protein encoded by SEQ ID NO: 119.

[0151] SEQ ID NO: 121 sets forth the nucleotide sequence of the coding region of the cDNA of Dk_05_29, an NLR from Aegilops longissima. If desired, a stop codon (e.g. TAA, TAG, or TGA) can be operably linked to the 3′ end of a nucleic acid molecule comprising or consisting of this NLR sequence. The native stop codon of this cDNA is TAA.

[0152] SEQ ID NO: 122 sets forth the amino acid sequence of the NLR protein encoded by SEQ ID NO: 121.

[0153] SEQ ID NO: 123 sets forth the nucleotide sequence of the coding region of the cDNA of Dk_05_30, an NLR from Aegilops longissima. If desired, a stop codon (e.g. TAA, TAG, or TGA) can be operably linked to the 3′ end of a nucleic acid molecule comprising or consisting of this NLR sequence. The native stop codon of this cDNA is TGA.

[0154] SEQ ID NO: 124 sets forth the amino acid sequence of the NLR protein encoded by SEQ ID NO: 123.

[0155] SEQ ID NO: 125 sets forth the nucleotide sequence of the coding region of the cDNA of Dk_05_33, an NLR from Aegilops longissima. If desired, a stop codon (e.g. TAA, TAG, or TGA) can be operably linked to the 3′ end of a nucleic acid molecule comprising or consisting of this NLR sequence. The native stop codon of this cDNA is TAG.

[0156] SEQ ID NO: 126 sets forth the amino acid sequence of the NLR protein encoded by SEQ ID NO: 125.

[0157] SEQ ID NO: 127 sets forth the nucleotide sequence of the coding region of the cDNA of Dk_05_34, an NLR from Aegilops longissima. If desired, a stop codon (e.g. TAA, TAG, or TGA) can be operably linked to the 3′ end of a nucleic acid molecule comprising or consisting of this NLR sequence. The native stop codon of this cDNA is TAG.

[0158] SEQ ID NO: 128 sets forth the amino acid sequence of the NLR protein encoded by SEQ ID NO: 127.

[0159] SEQ ID NO: 129 sets forth the nucleotide sequence of the coding region of the cDNA of Dk_05_35, an NLR from Aegilops longissima. If desired, a stop codon (e.g. TAA, TAG, or TGA) can be operably linked to the 3′ end of a nucleic acid molecule comprising or consisting of this NLR sequence. The native stop codon of this cDNA is TAA.

[0160] SEQ ID NO: 130 sets forth the amino acid sequence of the NLR protein encoded by SEQ ID NO: 129.

[0161] SEQ ID NO: 131 sets forth the nucleotide sequence of the coding region of the cDNA of Dk_05_38, an NLR from Aegilops longissima. If desired, a stop codon (e.g. TAA, TAG, or TGA) can be operably linked to the 3′ end of a nucleic acid molecule comprising or consisting of this NLR sequence. The native stop codon of this cDNA is TGA.

[0162] SEQ ID NO: 132 sets forth the amino acid sequence of the NLR protein encoded by SEQ ID NO: 131.

[0163] SEQ ID NO: 133 sets forth the nucleotide sequence of the coding region of the cDNA of Dk_05_42, an NLR from Aegilops longissima. If desired, a stop codon (e.g. TAA, TAG, or TGA) can be operably linked to the 3′ end of a nucleic acid molecule comprising or consisting of this NLR sequence. The native stop codon of this cDNA is TGA.

[0164] SEQ ID NO: 134 sets forth the amino acid sequence of the NLR protein encoded by SEQ ID NO: 133.

[0165] SEQ ID NO: 135 sets forth the nucleotide sequence of the coding region of the cDNA of Dk_05_44, an NLR from Aegilops longissima. If desired, a stop codon (e.g. TAA, TAG, or TGA) can be operably linked to the 3′ end of a nucleic acid molecule comprising or consisting of this NLR sequence. The native stop codon of this cDNA is TAA.

[0166] SEQ ID NO: 136 sets forth the amino acid sequence of the NLR protein encoded by SEQ ID NO: 135.

[0167] SEQ ID NO: 137 sets forth the nucleotide sequence of the coding region of the cDNA of Dk_05_47, an NLR from Aegilops longissima. If desired, a stop codon (e.g. TAA, TAG, or TGA) can be operably linked to the 3′ end of a nucleic acid molecule comprising or consisting of this NLR sequence. The native stop codon of this cDNA is TGA.

[0168] SEQ ID NO: 138 sets forth the amino acid sequence of the NLR protein encoded by SEQ ID NO: 137.

[0169] SEQ ID NO: 139 sets forth the nucleotide sequence of the coding region of the cDNA of Dk_05_53, an NLR from Aegilops longissima. If desired, a stop codon (e.g. TAA, TAG, or TGA) can be operably linked to the 3′ end of a nucleic acid molecule comprising or consisting of this NLR sequence. The native stop codon of this cDNA is TAA.

[0170] SEQ ID NO: 140 sets forth the amino acid sequence of the NLR protein encoded by SEQ ID NO: 139.

[0171] SEQ ID NO: 141 sets forth the nucleotide sequence of the coding region of the cDNA of Dk_05_56, an NLR from Aegilops longissima. If desired, a stop codon (e.g. TAA, TAG, or TGA) can be operably linked to the 3′ end of a nucleic acid molecule comprising or consisting of this NLR sequence. The native stop codon of this cDNA is TGA.

[0172] SEQ ID NO: 142 sets forth the amino acid sequence of the NLR protein encoded by SEQ ID NO: 141.

[0173] SEQ ID NO: 143 sets forth the nucleotide sequence of the coding region of the cDNA of Dk_06_01, an NLR from Brachypodium distachyon. If desired, a stop codon (e.g. TAA, TAG, or TGA) can be operably linked to the 3′ end of a nucleic acid molecule comprising or consisting of this NLR sequence. The native stop codon of this cDNA is TAA.

[0174] SEQ ID NO: 144 sets forth the amino acid sequence of the NLR protein encoded by SEQ ID NO: 143.

[0175] SEQ ID NO: 145 sets forth the nucleotide sequence of the coding region of the cDNA of Dk_06_03, an NLR from Aegilops longissima. If desired, a stop codon (e.g. TAA, TAG, or TGA) can be operably linked to the 3′ end of a nucleic acid molecule comprising or consisting of this NLR sequence. The native stop codon of this cDNA is TAA.

[0176] SEQ ID NO: 146 sets forth the amino acid sequence of the NLR protein encoded by SEQ ID NO: 145.

[0177] SEQ ID NO: 147 sets forth the nucleotide sequence of the coding region of the cDNA of Dk_06_04, an NLR from Aegilops longissima. If desired, a stop codon (e.g. TAA, TAG, or TGA) can be operably linked to the 3′ end of a nucleic acid molecule comprising or consisting of this NLR sequence. The native stop codon of this cDNA is TAA.

[0178] SEQ ID NO: 148 sets forth the amino acid sequence of the NLR protein encoded by SEQ ID NO: 147.

[0179] SEQ ID NO: 149 sets forth the nucleotide sequence of the coding region of the cDNA of Dk_06_05, an NLR from Aegilops longissima. If desired, a stop codon (e.g. TAA, TAG, or TGA) can be operably linked to the 3′ end of a nucleic acid molecule comprising or consisting of this NLR sequence. The native stop codon of this cDNA is TAA.

[0180] SEQ ID NO: 150 sets forth the amino acid sequence of the NLR protein encoded by SEQ ID NO: 149.

[0181] SEQ ID NO: 151 sets forth the nucleotide sequence of the coding region of the cDNA of Dk_06_06, an NLR from Aegilops longissima. If desired, a stop codon (e.g. TAA, TAG, or TGA) can be operably linked to the 3′ end of a nucleic acid molecule comprising or consisting of this NLR sequence. The native stop codon of this cDNA is TGA.

[0182] SEQ ID NO: 152 sets forth the amino acid sequence of the NLR protein encoded by SEQ ID NO: 151.

[0183] SEQ ID NO: 153 sets forth the nucleotide sequence of the coding region of the cDNA of Dk_06_52, an NLR from Aegilops searsii. If desired, a stop codon (e.g. TAA, TAG, or TGA) can be operably linked to the 3′ end of a nucleic acid molecule comprising or consisting of this NLR sequence. The native stop codon of this cDNA is TGA.

[0184] SEQ ID NO: 154 sets forth the amino acid sequence of the NLR protein encoded by SEQ ID NO: 153.

[0185] SEQ ID NO: 155 sets forth the nucleotide sequence of the coding region of the cDNA of Dk_06_53, an NLR from Aegilops searsii. If desired, a stop codon (e.g. TAA, TAG, or TGA) can be operably linked to the 3′ end of a nucleic acid molecule comprising or consisting of this NLR sequence. The native stop codon of this cDNA is TAG.

[0186] SEQ ID NO: 156 sets forth the amino acid sequence of the NLR protein encoded by SEQ ID NO: 155.

[0187] SEQ ID NO: 157 sets forth the nucleotide sequence of the coding region of the cDNA of Dk_01_21, an NLR from Aegilops sharonensis. If desired, a stop codon (e.g. TAA, TAG, or TGA) can be operably linked to the 3′ end of a nucleic acid molecule comprising or consisting of this NLR sequence. The native stop codon of this cDNA is TAA.

[0188] SEQ ID NO: 158 sets forth the amino acid sequence of the NLR protein encoded by SEQ ID NO: 157.

[0189] SEQ ID NO: 159 sets forth the nucleotide sequence of the coding region of the cDNA of Dk_01_48, an NLR from Aegilops sharonensis. If desired, a stop codon (e.g. TAA, TAG, or TGA) can be operably linked to the 3′ end of a nucleic acid molecule comprising or consisting of this NLR sequence. The native stop codon of this cDNA is TAG.

[0190] SEQ ID NO: 160 sets forth the amino acid sequence of the NLR protein encoded by SEQ ID NO: 159.

[0191] SEQ ID NO: 161 sets forth the nucleotide sequence of the coding region of the cDNA of Dk_03_15, an NLR from Cynosurus cristatus. If desired, a stop codon (e.g. TAA, TAG, or TGA) can be operably linked to the 3′ end of a nucleic acid molecule comprising or consisting of this NLR sequence. The native stop codon of this cDNA is TGA.

[0192] SEQ ID NO: 162 sets forth the amino acid sequence of the NLR protein encoded by SEQ ID NO: 161.

[0193] SEQ ID NO: 163 sets forth the nucleotide sequence of the coding region of the cDNA of Dk_03_49, an NLR from Holcus lanatus. If desired, a stop codon (e.g. TAA, TAG, or TGA) can be operably linked to the 3′ end of a nucleic acid molecule comprising or consisting of this NLR sequence. The native stop codon of this cDNA is TGA.

[0194] SEQ ID NO: 164 sets forth the amino acid sequence of the NLR protein encoded by SEQ ID NO: 163.

[0195] SEQ ID NO: 165 sets forth the nucleotide sequence of the coding region of the cDNA of Dk_03_68, an NLR from Aegilops sharonensis. If desired, a stop codon (e.g. TAA, TAG, or TGA) can be operably linked to the 3′ end of a nucleic acid molecule comprising or consisting of this NLR sequence. The native stop codon of this cDNA is TAG.

[0196] SEQ ID NO: 166 sets forth the amino acid sequence of the NLR protein encoded by SEQ ID NO: 165.

[0197] SEQ ID NO: 167 sets forth the nucleotide sequence of the coding region of the cDNA of Dk_04_67, an NLR from Aegilops bicornis. If desired, a stop codon (e.g. TAA, TAG, or TGA) can be operably linked to the 3′ end of a nucleic acid molecule comprising or consisting of this NLR sequence. The native stop codon of this cDNA is TGA.

[0198] SEQ ID NO: 168 sets forth the amino acid sequence of the NLR protein encoded by SEQ ID NO: 167.

[0199] SEQ ID NO: 169 sets forth the nucleotide sequence of the coding region of the cDNA of Dk_04_71, an NLR from Aegilops bicornis. If desired, a stop codon (e.g. TAA, TAG, or TGA) can be operably linked to the 3′ end of a nucleic acid molecule comprising or consisting of this NLR sequence. The native stop codon of this cDNA is TAG.

[0200] SEQ ID NO: 170 sets forth the amino acid sequence of the NLR protein encoded by SEQ ID NO: 169.

[0201] SEQ ID NO: 171 sets forth the nucleotide sequence of the coding region of the cDNA of Dk_04_91, an NLR from Aegilops bicornis. If desired, a stop codon (e.g. TAA, TAG, or TGA) can be operably linked to the 3′ end of a nucleic acid molecule comprising or consisting of this NLR sequence. The native stop codon of this cDNA is TAG.

[0202] SEQ ID NO: 172 sets forth the amino acid sequence of the NLR protein encoded by SEQ ID NO: 171.

[0203] SEQ ID NO: 173 sets forth the nucleotide sequence of the coding region of the cDNA of Dk_05_75, an NLR from Aegilops bicornis. If desired, a stop codon (e.g. TAA, TAG, or TGA) can be operably linked to the 3′ end of a nucleic acid molecule comprising or consisting of this NLR sequence. The native stop codon of this cDNA is TGA.

[0204] SEQ ID NO: 174 sets forth the amino acid sequence of the NLR protein encoded by SEQ ID NO: 173.

[0205] SEQ ID NO: 175 sets forth the nucleotide sequence of the coding region of the cDNA of Dk_05_92, an NLR from Aegilops bicornis. If desired, a stop codon (e.g. TAA, TAG, or TGA) can be operably linked to the 3′ end of a nucleic acid molecule comprising or consisting of this NLR sequence. The native stop codon of this cDNA is TAG.

[0206] SEQ ID NO: 176 sets forth the amino acid sequence of the NLR protein encoded by SEQ ID NO: 175.

[0207] SEQ ID NO: 177 sets forth the nucleotide sequence of the coding region of the cDNA of Dk_06_02, an NLR from Aegilops longissima. If desired, a stop codon (e.g. TAA, TAG, or TGA) can be operably linked to the 3′ end of a nucleic acid molecule comprising or consisting of this NLR sequence. The native stop codon of this cDNA is TAG.

[0208] SEQ ID NO: 178 sets forth the amino acid sequence of the NLR protein encoded by SEQ ID NO: 177.

[0209] SEQ ID NO: 179 sets forth the nucleotide sequence of the coding region of the cDNA of Dk_06_10, an NLR from Aegilops bicornis. If desired, a stop codon (e.g. TAA, TAG, or TGA) can be operably linked to the 3′ end of a nucleic acid molecule comprising or consisting of this NLR sequence. The native stop codon of this cDNA is TAG.

[0210] SEQ ID NO: 180 sets forth the amino acid sequence of the NLR protein encoded by SEQ ID NO: 179.

[0211] SEQ ID NO: 181 sets forth the nucleotide sequence of the coding region of the cDNA of Dk_06_36, an NLR from Aegilops searsii. If desired, a stop codon (e.g. TAA, TAG, or TGA) can be operably linked to the 3′ end of a nucleic acid molecule comprising or consisting of this NLR sequence. The native stop codon of this cDNA is TGA.

[0212] SEQ ID NO: 182 sets forth the amino acid sequence of the NLR protein encoded by SEQ ID NO: 181.

[0213] SEQ ID NO: 183 sets forth the nucleotide sequence of the coding region of the cDNA of Dk_08_16, an NLR from Aegilops sharonensis. If desired, a stop codon (e.g. TAA, TAG, or TGA) can be operably linked to the 3′ end of a nucleic acid molecule comprising or consisting of this NLR sequence. The native stop codon of this cDNA is TGA.

[0214] SEQ ID NO: 184 sets forth the amino acid sequence of the NLR protein encoded by SEQ ID NO: 183.

[0215] SEQ ID NO: 185 sets forth the nucleotide sequence of the coding region of the cDNA of Dk_08_79, an NLR from Avena abyssinica. If desired, a stop codon (e.g. TAA, TAG, or TGA) can be operably linked to the 3′ end of a nucleic acid molecule comprising or consisting of this NLR sequence. The native stop codon of this cDNA is TAG.

[0216] SEQ ID NO: 186 sets forth the amino acid sequence of the NLR protein encoded by SEQ ID NO: 185.

[0217] SEQ ID NO: 187 sets forth the nucleotide sequence of the coding region of the cDNA of Dk_09_55, an NLR from Briza media. If desired, a stop codon (e.g. TAA, TAG, or TGA) can be operably linked to the 3′ end of a nucleic acid molecule comprising or consisting of this NLR sequence. The native stop codon of this cDNA is TGA.

[0218] SEQ ID NO: 188 sets forth the amino acid sequence of the NLR protein encoded by SEQ ID NO: 187.

### DETAILED DESCRIPTION OF THE INVENTION

[0219] The present inventions now will be described more fully hereinafter with reference to the accompanying drawings, in which some, but not all embodiments of the inventions are shown. Indeed, these inventions may be embodied in many different forms and should not be construed as limited to the embodiments set forth herein; rather, these embodiments are provided so that this disclosure will satisfy applicable legal requirements. Like numbers refer to like elements throughout.

[0220] Many modifications and other embodiments of the inventions set forth herein will come to mind to one skilled in the art to which these inventions pertain having the benefit of the teachings presented in the foregoing descriptions and the associated drawings. Therefore, it is to be understood that the inventions are not to be limited to the specific embodiments disclosed and that modifications and other embodiments are intended to be included within the scope of the appended claims. Although specific terms are employed herein, they are used in a generic and descriptive sense only and not for purposes of limitation.

[0221] In one aspect, the present invention relates to methods for preparing a library of candidate plant disease resistance (NLR) genes. Such a library of candidate NLR genes finds use in the increasing the efficiency of methods for the identification of an NLR gene in a plant that is capable of conferring to a susceptible host plant resistance to a plant pathogen of interest. Because plant genomes typically comprise hundreds of NLRs, it can be an arduous task to identify a those NLR genes in plant that provide resistance to plant disease caused by a plant pathogen of interest. The methods of present invention find use in reducing the number of candidate NLR genes using a novel signature that need to be tested in a susceptible host plant to determine if a particular candidate NLR gene is capable of conferring to the susceptible host plant resistance to the plant pathogen of interest. The methods of the present invention involve selecting NLRs that display the signature of high expression in unchallenged plant tissues. This signature has previously been overlooked as NLRs are typically thought to be low expressed genes that can sometimes cause yield penalties. See Lai & Eulgem, 2018, Mol. Plant Pathol. 19(5): 1267-1281; Tian et al., 2003, Nature 423(6935): 74-77; Fitzgerald et al., 2004, MPMI 17(2): 140-151; Chern et al., 2005, MPMI 18(6):511-520; Karasov et al., 2017, Plant Cell 29(4): 666-680; Jones & Dangl, 2006, Nature 444(7117):323-329; Richard et al., 2018, Mol. Plant Pathol. 19(11):2516-2523; and Baggs et al., 2017, Curr. Opin. Plant Biol. 38:59-67.

[0222] In a second aspect, the present invention relates to improved methods for identifying an NLR gene against a plant pathogen of interest using a library of candidate NLR genes prepared according to methods of present invention. The methods find use in the identification of new NLR genes that can be incorporated into a crop plant to confer resistance to a plant disease of interest. Such new NLR genes are desired by plant breeders to aid in the development of new crop plant varieties with enhanced resistance to one or more plant diseases.

[0223] The methods of present invention find use in identifying NLR genes against a wide range of pathogens including, but not limited to, fungal, bacterial, oomycete, nematode, and viral plant pathogens. Plant pathogens of interest are those plant pathogens that are capable of causing plant disease symptoms on a host plant of interest, particularly a crop plant or other plant grown by humans for food, fiber, or animal feed, more particularly a crop plant or other plant this is known to suffer agronomic yield losses due to plant disease caused by the plant pathogen of interest.

[0224] The present invention is based in part on certain observations or discoveries made by the present inventors. First, all characterized NLR genes to foliar pathogens are expressed in unchallenged leaf tissue in monocots and dicots. Published examples include Pm3b, Rpg5, Sr33, and CcRpp1 (Kawashima et al., 2016, Nature Biotechnol. 2016 34(6):661-665; U.S. Pat. No. 10,842,097). Second, the average number of NLRs expressed in a leaf transcriptome is between 100 and 200 for diverse grass species including, but not limited to, wheat, barley, Aegilops sharonensis, Achnatherum hymenoides, Aegilops bicornis, Aegilops longissima, Aegilops searsii, Aegilops sharonensis, Agropyron cristatum, Avena abyssinica, Brachypodium distachyon, Briza media, Cynosurus cristatus, Echinaria capitata, Holcus lanatus, Hordeum vulgare, Koeleria macrantha, Lolium perenne, Melica ciliate, Phalaris coerulescens, and Poa trivialis. This is a fraction of the total number of NLRs in a genome. For example, only about 10% of all the NLRs encoded on the barley/wheat genome are expressed in leaf tissue (FIGS. 1-3). Critically, within the group of NLRs that are expressed in a leaf transcriptome, the subgroup of highly expressed NLRs is saturated for functional R genes (FIGS. 1-11). This discovery is based on performed bioinformatic analyses on the expression level within model species Arabidopsis thaliana, accession Columbia-0 (Col-0), where many R genes have been cloned and characterized. The observations in this well-studied species corroborate our initial observations; of the 10 NLRs that are described to convey resistance, 9 are present in the top 25% of NLRs expressed in leaf tissue (FIG. 5). This signature has been previously overlooked as earlier publications suggested that NLRs have a negative yield impact, leading to the widely held assumption that functional NLRs within this class of protein must be present at low level. The highest expressed NLRs are those which are effective against Hyaloperonospora arabidopsis and Albugo candida which are pathogens that are known to co-evolve with A. thaliana. Publicly available data (Kawashima et al., 2016, Nature Biotechnol. 2016 34(6):661-665) was used to determine if an NLR gene that was identified via map-based cloning (CcRpp1) could be identified using the above criteria. Indeed, CcRpp1 was determined to be in the top 10% of highly expressed NLRs (FIG. 4).

[0225] The present invention provides methods for preparing a library of candidate NLR genes against one or more plant pathogen(s) of interest. The methods comprise selecting from each of one or more plants of interest, a subpopulation of highly expressed NLRs from among a population of constitutively expressed NLRs in an organ or other part of the one or more plants, so as to produce a library of candidate R genes. The subpopulation of highly expressed NLRs comprises NLRs that are highly expressed, constitutively in an organ or other part of the plant in the absence of the plant or any organ or other part thereof being contacted with or otherwise exposed to one or more plant pathogens of interest. Such plant tissue is referred to herein as “unchallenged” plant tissue because neither the plant tissue nor any part of the plant from the tissue originates or originated was contacted intentionally with any plant pathogen of interest or is otherwise known to be infected with a plant pathogen or afflicted by any other plant pest such as, for example, insects and mites.

[0226] Such unchallenged plant tissue can be a plant organ (e.g. a leaf, a stem, or a root) or any other part of a plant that has not been contacted with or otherwise exposed to a pathogen of interest. Preferably, neither the unchallenged plant tissue nor any other part of the plant has been exposed to the plant pathogen of interest, and the plant is good health and not displaying any symptoms of plant disease or signs of damage from other plant pests such as, for example, insects.

[0227] The subpopulation of NLRs that is expressed in plant organ or other part of the plant or plants can be determined by detecting mRNAs of individual NLRs preferably by a transcriptome profiling method such as, for example, RNA Sequencing (RNAseq), which can be used not only to identify of individual NLR genes that are expressed in a plant organ or other part of the plant or plants, but also to assess relative expression levels of the various expressed NLR genes. Thus, RNAseq can be employed to determine both the subpopulation of expressed NLRs in a plant organ or other plant tissue and the portion of the expressed NLRs that are highly expressed candidate R genes to produce the library of candidate R gene. Other methods to identify highly expressed NLRs are those that can be used in the methods of the present invention to quantify differential levels in transcripts including, for example, microarray technologies such as Affymetrix arrays and spotted cDNA arrays. Alternatively, as highly expressed NLRs can be identified by higher average protein levels for the NLR proteins encoded by their respective NLRs, protein quantification methods can be employed including but not limited to LC-MS, LC-MS/MS, MassSpec, Q-TOF, and the like.

[0228] Typically, the highly expressed NLRs comprise a relative expression levels in the organ or other part of the plant that is greater than the relative expression levels in the same organ or same part of the plant of at least about 65% of expressed NLRs. Preferably, the highly expressed NLRs comprise expression levels in the organ or other part of the plant this is greater than the relative expression levels in the same organ or same part of the plant of at least about 65%, 70%, 75%, 80%, 85%, 90%, or 95% of expressed NLRs. In other words, the highly expressed NLRs in a particular organ or other part of a plant of interest are those expressed NLRs that have expression levels in at least about the top 35%, 30%, 25%, 20%, 15%, 10%, 5%, 4%, or 3%, when compared to the expression levels of all expressed NLRs in the particular organ or other part of the plant of interest. Preferably, the highly expressed NLRs in a particular organ or other part of a plant of interest are those expressed NLRs that have expression levels in at least about the top 25%, 20%, 15%, 10%, 5%, 4%, or 3%, when compared to the expression levels of all expressed NLRs in the particular organ or other part of the plant of interest. More preferably, the highly expressed NLRs in a particular organ or other part of a plant of interest are those expressed NLRs that have expression levels in at least about the top 20%, 15%, 10%, 5%, 4%, or 3%, when compared to the expression levels of all expressed NLRs in the particular organ or other part of the plant of interest. Most preferably, the highly expressed NLRs in a particular organ or other part of a plant of interest are those expressed NLRs that have expression levels in at least about the top 20%, 15%, 10%, 5%, 4%, or 3%, when compared to the expression levels of all expressed NLRs in the particular organ or other part of the plant of interest.

[0229] It is recognized that the choice of any suitable relative expression level for determining the highly expressed NLRs will depend on any number of factors including, for example, the plant species, the plant organ or other part of the plant used as the mRNA source, the total number of expressed NLR genes in the plant of interest, the portion of the total NLRs in the genome of the plant that are expressed in the plant organ or other plant part, and the growth conditions of the plant from which the mRNA was isolated.

[0230] In certain embodiments of the invention involving RNAseq, TransDecoder (v4.1.0; available on the World Wide Web at github.com/TransDecoder/TransDecoder/releases) LongOrfs can be used to predict all open reading frames in de novo assembled transcriptomes. To identify transcripts encoding putative NLR proteins, InterProScan (v5.27-66.0) (Jones et al., (2014) Bioinformatics 30(9): 1236-1240; doi: 10.1093/bioinformatics/btu031) can be used, for example, to annotate domains using Coils and the Pfam, Superfamily, and ProSite databases. Any NLR gene encoding a protein containing both a nucleotide binding (NB) domain and a leucine-rich repeat (LRR) domain can be identified as an NLR protein and advanced in the analysis. A custom script developed from FAT-CAT (Afrasiabi et al. (2013) Nucleic Acids Res. 41:W242-W248, doi.org/10.1093/nar/gkt399) can be used to classify nucleotide binding domains based on a phylogenetic tree developed from rice, Brachypodium distachyon, and barley nucleotide binding domains derived from NLRs. NLR encoding genes can be advanced, for example, based on the following requirements: the transcript contains either a complete or a 5′ partial open reading frame; the gene is among the top 25% expressed NLRs in the plant organ or other plant part; and the gene does not belong to NLR families known to require an additional NLR (see, for example, Bailey et al. (2018) Genome Biol. 19:23). Among the candidate NLRs, redundancy was removed using CD-HIT (v4.7) requiring 100% identity (-c 1.0). PCR primers were developed using Gateway adapters attB1 (SEQ ID NO: 27) and attB2 (SEQ ID NO: 28) fused to first 20 nucleotides of the start or end of the coding sequence, respectively. See Katzen. (2007) Expert Opin. Drug Discov. 2(4):571-589 for an overview of the Gateway cloning technology.

[0231] In this embodiment of the invention, the identified NLR proteins comprise at least one NB domain and at least one LRR domain. Such identified NLR proteins can further comprise one or more additional domains, particularly domains that are known to occur in NLR proteins including, but not limited to, a coiled-coiled (CC) domain, a Toll/Interleukin-1 Receptor (TIR) domain, an additional NB domain, and an additional LRR domain. Examples of identified NLR proteins of the present invention are further described in Example 2 below.

[0232] While the typical order for the domains of known NLR proteins in an N-terminal to C-terminal direction is CC-NB-LRR, TIR-NB-LRR, or NB-LRR, the methods of the present invention do not depend on NLR proteins having particular structure and can accommodate domain structures that are atypical for known NLR proteins.

[0233] In certain embodiment of the invention, the methods for preparing a library of candidate NLR genes against at least one plant pathogen of interest can comprise a further selection for NLRs comprising at least one additional feature of interest, whereby the library of candidate NLR genes comprises those NLRs that are highly expressed and comprise the one of more additional features of interest. Previous work has established molecular and evolutionary signatures of NLRs that contribute to plant immunity such as gene family and rapid evolution (Yang et al., 2013, PNAS 110:18572-18577). Such features of interest include, but are not limited to:
[0234] (i) the presence of intraspecific variation in the amino acid sequence encoded by an NLR;
[0235] (ii) the absence of intraspecific variation in the amino acid sequence encoded by an NLR;
[0236] (iii) the presence of interspecific variation in the amino acid sequence encoded by an NLR;
[0237] (iv) the absence of interspecific variation in the amino acid sequence encoded by an NLR; and
[0238] (v) substantial interspecific allelic variation in the amino acid sequence encoded by an NLR.

[0239] Unless stated otherwise or apparent from the context of a use “substantial intraspecific and interspecific variation” for the present invention is intended to mean the presence of maintained sequence polymorphisms, diversifying selection, and the over-representation of nonsynonymous substitutions as compared to synonymous substitutions present in alleles maintained across individuals within a population. Examples of NLRs with substantial intraspecific allelic variation include the Mla alleles in barley (Jørgensen, 1994, Plant Sci. 13:97-119; Seeholzer et al., 2010, MPMI 23:497-509) and Pm3 alleles in wheat (Bourras et al., 2018, Curr. Opin. Microbiol. 46:26-33; Bourras et al., 2015, Bourras et al., 2015, Plant Cell 27:2991-3012)

[0240] The methods of present invention comprise selecting the NLRs that are highly expressed in an organ or other part of the plant(s) of interest so as to produce a library of candidate NLR genes. Plants of interest include, for example, crop plants and both domesticated and non-domesticated relatives of crop plants. Such relatives include plants that are from same species as the crop plant or relatives that are different species as the crop but are from the same family, subfamily, and/or tribe as the crop plant. In some embodiments of the invention, the plant from which the library of candidate NLR genes is derived is a non-domesticated relative of a host plant that is a crop plant and the candidate NLR gene are intended for use in the crop plant. Preferably, such relatives of a host plant are in the same family, subfamily, tribe, and/or genus as the plant from which the library of candidate NLR genes is derived. In some other embodiments, the host plant and the plant from which the library of candidate NLR genes is derived are from the same species.

[0241] A plant or plants of interest from which the library of candidate NLR genes is derived can be any plant accession, variety, or species that does not support growth or lifecycle completion of a pathogen of interest. Indeed, an R gene that is derived from a plant of interest of a first species can be transferred into a plant of a second species that is a host of for plant pathogen of interest whereby a resistant plant of the second species is produced. Examples of R genes that are derived from one species and transferred into a second species include, but are not limited to, the NLRs Bs2 from pepper (Capsicum annuum) (Tai et al., 1999, PNAS 96(24): 14153-14158; transferred into tomato, i.e. Solanum lycopersicum) and CcRpp1 from pigeon pea (Cajanus cajan) (Kawashima et al., 2016, Nature Biotechnol. 2016 34(6):661-665; transferred into soybean, i.e. Glycine max). Preferably for the present invention, the first and second species are in the same family. In certain embodiments, the first and second species are in the same family, but in a different subfamily, tribe, and/or genus.

[0242] In certain preferred embodiments, plants that are expected to comprise one or more effective NLR resistance genes against one or more pathogens of interest are used as the plants from which libraries of NLR genes are derived. Such plants are expected to comprise effective NLR resistance genes against one or more pathogens of interest because the plants do not support the growth of the one or more plant pathogens of interest. For the example, relatives of bread wheat (T. aestivum) that such carry effective resistance against one or more pathogens of wheat are species in the Poaceae family including, but not limited to, species in the genera Achnatherum, Aegilops, Agropyron, Avena, Brachypodium, Briza, Cynosurus, Echinaria, Holcus, Hordeum, Koeleria, Lolium, Melica, Phalaris, and Poa. Such species include, for example, Achnatherum hymenoides, Aegilops bicornis, Aegilops longissima, Aegilops searsii, Aegilops sharonensis, Agropyron cristatum, Avena abyssinica, Brachypodium distachyon, Briza media, Cynosurus cristatus, Echinaria capitata, Holcus lanatus, Hordeum vulgare, Koeleria macrantha, Lolium perenne, Melica ciliata, Phalaris coerulescens, and Poa trivialis.

[0243] A library of candidate R genes of the present invention can be produced using one or more plants of interest, wherein each of the plants is genetically distinct from one another. If, for example, a library of candidate R genes can be produced using two, three, four, or more plants of interest from the same species, such two, three, four, or more plants of interest can have the same genotypes or two, three, four, or more different genotypes. It is recognized that the number of plants of interest used to produce a library of candidate R genes can vary depending on a number of factors, including, for example, the host plant, the pathogen or pathogens of interest, and the availability of genetically distinct plants of interest that are expected to comprise effective NLR genes against the one or more plant pathogens. Thus, using the methods of the present invention, a library of candidate R genes can be produced using at least 1, 2, 3, 4, 5, 10, 15, 20, 25, 30, 40, 50, 60, 70, 80, 90, 100, 125, 150, 200, 250, 300, 400, 500, 600, 700, 800, 900, 1000, 1250, 1500, 1750, 2000, or more genetically distinct plants of interest.

[0244] The methods of the present invention do not depend upon use of a particular plant organ or plant part. Any plant organ or plant part at any developmental stage and/or grown under any environmental conditions, notwithstanding that the plant organ or plant part is from an unchallenged plant. Plant organs include, but not are not limited to, leaves, stems, flowers, roots, fruits, pods, seeds, cotyledons, hypocotyls, epicotyls, radicles, and the like. Plant parts include, for example, leaf midribs, leaf blades, petals, sepals, pedicles, peduncles, and internodes. In certain embodiments of the invention that are described in detail below, the plant organ is a leaf.

[0245] The present invention further provides compositions comprising a library of candidate NLR genes produced according to methods described above. Such a library comprises at least two candidate NLR genes but typically comprises at least about 10, 20, 30, 40, 50, 75, 100, 125, 150, 175, 200, 225, 250, 300, 400, 500, 600, 700, 800, 900, 1000, 1250, 1500, 1750, 2000, or more candidate NLR genes. Such compositions find use in methods for identifying a plant disease resistance (NLR) gene against a plant pathogen of interest.

[0246] Further provided are compositions comprising a collection of transgenic plants, wherein each of the transgenic plants is produced by transforming a host plant with a candidate NLR gene from a library of candidate NLR genes prepared according to the methods described above. Such compositions also find use in methods for identifying a plant disease resistance (NLR) gene against a plant pathogen of interest. A collection of transgenic plants of the present invention comprises at least two transgenic plants but typically comprises at least about 10, 20, 30, 40, 50, 75, 100, 125, 150, 175, 200, 225, 250, 300, 400, 500, 600, 700, 800, 900, 1000, 1250, 1500, 1750, 2000, or more plants with each transgenic plant comprising a different candidate R gene. Preferably, the collection of transgenic plants comprises transgenic plants representing at least about 50%, 60%, 70%, or 80% of the NLR genes in a library of candidate NLR genes. More preferably, the collection of transgenic plants comprises transgenic plants representing at least about 90%, 95%, 96%, 97%, 98%, 99%, or 100% of the NLR genes in a library of candidate NLR genes. If, for example, a library of candidate NLR genes comprises 99 different NLR genes, a collection of transgenic plants representing all the NLR genes in the library will comprise at least 99 plants, with the each of the 99 plants comprising a different NLR gene. It is recognized that the collection of transgenic plants can comprise two or more transgenic plants for each different NLR gene. The two or more transgenic plants comprising the same NLR gene can comprise in their respective genomes the same transgenic event for which the NLR gene is located in same position in their respective genomes. Alternatively, the two or more transgenic plants comprising the same NLR gene can comprise in their respective genomes independent transgenic events for which the NLR gene is not located in same position in their respective genomes.

[0247] The present invention further provides compositions for identifying an NLR gene against a plant pathogen of interest involving the use of a library of candidate NLR genes. Such methods comprise producing a host plant transformed with a candidate NLR gene selected from a library of NLR genes prepared according to the methods of the present invention. The host plant is a host for the plant pathogen of interest and the plant pathogen is capable of causing plant disease symptoms on the host plant under suitable environmental conditions for the development of disease symptoms. The methods further comprise contacting the transformed host plant, or otherwise exposing the transformed host plant to, the plant pathogen of interest under environmental conditions suitable for the development of disease symptoms, and then after a period of time sufficient for the development of disease symptoms, determining if the transformed host plant displays enhanced resistance to the plant pathogen of interest when compared to a control host plant that does not comprise the candidate NLR gene, wherein the candidate NLR gene is an NLR gene against the plant pathogen of interest when the transformed host plant displays enhanced resistance to plant disease symptoms caused by the plant pathogen of interest.

[0248] It is recognized that such suitable environmental conditions for the development of disease symptoms depends on the host plant-plant pathogen combination and is known in the art or can be determined using routine methods available in the art. It is further recognized that the period of time after inoculation (i.e. after contacting the host plant with the pathogen) that is sufficient for the development of disease symptoms also depends on the host plant-plant pathogen combination and either is known in the art or can be determined using routine methods available in the art.

[0249] The present invention further provides methods for identifying an NLR gene against a plant pathogen of interest involving the use of a transgenic plant comprising a candidate NLR gene from a library of candidate NLR genes prepared according to the methods described above or a collection of such transgenic plants. Such methods comprise contacting the transgenic plant or the collection of transgenic plants with the plant pathogen of interest under environmental conditions suitable for the development of disease symptoms. The transgenic plants are host plants for the plant pathogen of interest and the plant pathogen is capable of causing plant disease symptoms on the host plant. The methods further comprise assessing disease symptoms on the transgenic plant or plants after a period of time sufficient for the development of disease symptoms following contacting the members with the plant pathogen. A transgenic plant comprising an NLR gene against the plant pathogen of interest is identified when the transgenic plant displays enhanced resistance to plant disease caused by the plant pathogen of interest, when compared to a control plant that does not comprise a candidate NLR gene.

[0250] A collection of transgenic plants of the present invention is not limited to use with a single pathogen. As described in detail below in the Examples, a collection of transgenic plants can be separately screened for resistance to one, two, three, four, five, or more plant pathogens of interest that are capable of causing plant disease symptoms on the host plant to identify functional NLR genes from among the candidate NLR genes represented in the collection of transgenic plants. Such functional NLR genes are NLR genes that are capable of conferring to a host plant comprising the NLR gene resistance against one or more of the pathogens of interest.

[0251] The present invention further relates to nucleic acid molecule compositions comprising isolated NLR genes of the present invention and other nucleic molecules encoding NLR proteins encoded by such NLR genes and to protein compositions comprising NLR proteins of the present invention. Such compositions include, but not limited to, plants, plant cells, and other host cells comprising one or more of such NLR proteins and/or one or more nucleic acid molecules, and expression cassettes and vectors comprising one or more of such nucleic acid molecules.

[0252] The present invention encompasses nucleic acid molecules comprising one or more of the nucleotide sequences encoding NLR proteins disclosed herein or in the accompanying sequence listing and/or drawings. Such nucleic acid molecules include, but not limited to, a nucleic acid molecule comprising at least one a nucleotide sequence selected from the group consisting of: the nucleotide sequence set forth in SEQ ID NO: 1, 3, 5, 7, 9, 11, 13, 15, 17, 19, 21, 23, 25, 29, 31, 33, 35, 37, 39, 41, 43, 45, 47, 49, 51, 53, 55, 57, 59, 61, 63, 65, 67, 69, 71, 73, 75, 77, 79, 81, 83, 85, 87, 89, 91, 93, 95, 97, 99, 101, 103, 105, 107, 109, 111, 113, 115, 117, 119, 121, 123, 125, 127, 129, 131, 133, 135, 137, 139, 141, 143, 145, 147, 149, 151, 153, 155, 157, 159, 161, 163, 165, 167, 169, 171, 173, 175, 177, 179, 181, 183, 185, or 187; a nucleotide sequence encoding a polypeptide comprising an amino acid sequence set forth in SEQ ID NO: 2, 4, 6, 8, 10, 12, 14, 16, 18, 20, 22, 24, 26, 30, 32, 34, 36, 38, 40, 42, 44, 46, 48, 50, 52, 54, 56, 58, 60, 62, 64, 66, 68, 70, 72, 74, 76, 78, 80, 82, 84, 86, 88, 90, 92, 94, 96, 98, 100, 102, 104, 106, 108, 110, 112, 114, 116, 118, 120, 122, 124, 126, 128, 130, 132, 134, 136, 138, 140, 142, 144, 146, 148, 150, 152, 154, 156, 158, 160, 162, 164, 166, 168, 170, 172, 174, 176, 178, 180, 182, 184, 186, or 188; a nucleotide sequence set forth in the sequence listing; a nucleotide sequence encoding an amino acid sequence set forth in the sequence listing; and variants thereof. Preferably, such nucleic acid molecules are capable of conferring to a plant, particularly a wheat plant, a barley plant, a triticale plant, and/or an oat plant, enhanced resistance to one or more plant pathogens of interest including, for example, wheat stem rust (Puccinia graminis f. sp. tritici), wheat stripe rust (Puccinia striiformis f. sp. tritici), wheat leaf rust (Puccinia triticina), wheat blast (Magnaporthe oryzae Triticum) and wheat powdery mildew (Blumeria graminis f. sp. tritici).

[0253] The present invention further encompasses plants, plant cells, host cells, expression cassettes, polynucleotide constructs and vectors comprising at least one of such nucleic acid molecules, as well as food products produced from such plants. Additionally encompassed by the present invention are uses of plants comprising at least one of such nucleic acid molecules in the methods disclosed elsewhere herein such as, for example, methods of limiting plant diseases in agricultural crop production.

[0254] In certain embodiments of present invention, the plants and plant cells of the present invention comprise at least one heterologous polynucleotide construct comprising a nucleic acid of the present invention. Such a heterologous polynucleotide can be introduced into a plant or a cell thereof by a stable or transient plant transformation method disclosed elsewhere herein or otherwise known in the art.

[0255] The present invention additionally provides methods for enhancing the resistance of a plant to a plant pathogen, particularly a plant comprising partial resistance to the plant pathogen. As used herein, full or complete resistance is defined as the inability of the pathogen to spread within the host plant genotype. With full resistance, localized cell death is observed on the plant after being contacted by the pathogen but there are no spreading lesions. In contrast with partial resistance, the pathogen may still be able to infect the host plant and cause a spreading lesion, but the spread of the lesion is restricted or limited, when compared to a susceptible plant.

[0256] Such methods for enhancing the resistance of a plant comprise modifying a plant cell to be capable of expressing of NLR protein. The methods optionally further comprise regenerating the modified plant cell into a modified plant comprising enhanced resistance to the plant pathogen.

[0257] In some embodiments, the methods comprise introducing into at least one plant cell a polynucleotide construct comprising an NLR gene of the present invention with its native promoter. In other embodiments, such methods comprise introducing into at least one plant cell a polynucleotide construct comprising a promoter that drives expression in a plant and an operably linked nucleic acid molecule encoding the NLR protein using plant transformation methods described elsewhere herein or otherwise known in the art. Preferred promoters for enhancing the resistance of a plant to a plant pathogen are promoters known to drive high-level gene expression such as, for example, the CaMV 35S promoter and the maize ubiquitin promoter. Additional promoters that are suitable for use in the methods of the present invention are described hereinbelow.

[0258] The methods of the present invention find use in producing plants with enhanced resistance to a plant disease caused by a plant pathogen. Typically, the methods of the present invention will enhance or increase the resistance of the subject plant to one strains of a plant pathogen or to each of two or more strains of the plant pathogen by at least 25%, 50%, 75%, 100%, 150%, 200%, 250%, 500% or more when compared to the resistance of a control to same strain or strains of the plant pathogen. Unless stated otherwise or apparent from the context of a use, a control plant for the present invention is a plant that does not comprise the polynucleotide construct of the present invention. Preferably, the control plant is essentially identical (e.g. same species, subspecies, and variety) to the plant comprising the polynucleotide construct of the present invention except that the control does not comprise the polynucleotide construct. In some embodiments, the control plant will comprise a polynucleotide construct but not comprise a candidate NLR gene or NLR gene of the present invention or a nucleotide sequence encoding a protein that is encoded by such a candidate NLR gene or NLR gene. In other embodiments, the control plant will not comprise a polynucleotide construct.

[0259] The plants of the present invention comprising an NLR gene disclosed herein find use in methods for limiting plant disease caused by at least one plant pathogen in agricultural crop production, particularly in regions where such a plant disease is prevalent and is known to negatively impact, or at least has the potential to negatively impact, agricultural yield. The methods of the invention comprise planting a plant (e.g. a seedling), seed, or tuber of the present invention, wherein the plant, seed, or tuber comprises at least one NLR gene of the present invention. The methods further comprise growing the plant that is derived from the seedling, seed, or tuber under environmental conditions favorable for the growth and development of the plant, and optionally harvesting at least one fruit, tuber, leaf, or seed from the plant. Such environmental conditions can include, for example, air temperature, soil temperature, soil water content, photoperiod, light intensity, soil pH, and soil fertility. It is recognized that the environmental conditions favorable for the growth and development of a plant of interest will vary depending on, for example, the plant species or even the particular variety (e.g. cultivar) or genotype of the plant of interest. It is further recognized that the environmental conditions that are favorable for the growth and development of the plants of interest of the present invention are known in the art.

[0260] Additionally, the present invention provides plants, seeds, and plant cells produced by the methods of present invention and/or comprising a polynucleotide construct of the present invention. Also provided are progeny plants and seeds thereof comprising a polynucleotide construct of the present invention. The present invention also provides seeds, vegetative parts, and other plant parts produced by the transformed plants and/or progeny plants of the invention as well as food products and other agricultural products produced from such plant parts that are intended to be consumed or used by humans and other animals including, but not limited to pets (e.g., dogs and cats) and livestock (e.g., pigs, cows, chickens, turkeys, and ducks).

[0261] The present invention encompasses isolated or substantially purified polynucleotide (also referred to herein as “nucleic acid molecule”, “nucleic acid” and the like) or protein (also referred to herein as “polypeptide”) compositions including, for example, polynucleotides and proteins comprising the sequences set forth in the accompanying Sequence Listing as well as variants and fragments of such polynucleotides and proteins. An “isolated” or “purified” polynucleotide or protein, or biologically active portion thereof, is substantially or essentially free from components that normally accompany or interact with the polynucleotide or protein as found in its naturally occurring environment. Thus, an isolated or purified polynucleotide or protein is substantially free of other cellular material or culture medium when produced by recombinant techniques, or substantially free of chemical precursors or other chemicals when chemically synthesized. Optimally, an “isolated” polynucleotide is free of sequences (optimally protein encoding sequences) that naturally flank the polynucleotide (i.e., sequences located at the 5′ and 3′ ends of the polynucleotide) in the genomic DNA of the organism from which the polynucleotide is derived. For example, in various embodiments, the isolated polynucleotide can contain less than about 5 kb, 4 kb, 3 kb, 2 kb, 1 kb, 0.5 kb, or 0.1 kb of nucleotide sequence that naturally flank the polynucleotide in genomic DNA of the cell from which the polynucleotide is derived. A protein that is substantially free of cellular material includes preparations of protein having less than about 30%, 20%, 10%, 5%, or 1% (by dry weight) of contaminating protein. When the protein of the invention or biologically active portion thereof is recombinantly produced, optimally culture medium represents less than about 30%, 20%, 10%, 5%, or 1% (by dry weight) of chemical precursors or non-protein-of-interest chemicals.

[0262] Fragments and variants of the disclosed polynucleotides and proteins encoded thereby are also encompassed by the present invention. By “fragment” is intended a portion of the polynucleotide or a portion of the amino acid sequence and hence protein encoded thereby. Fragments of polynucleotides comprising coding sequences may encode protein fragments that retain biological activity of the full-length or native protein. Alternatively, fragments of a polynucleotide that are useful as hybridization probes generally do not encode proteins that retain biological activity or do not retain promoter activity. Thus, fragments of a nucleotide sequence may range from at least about 20 nucleotides, about 50 nucleotides, about 100 nucleotides, and up to the full-length polynucleotide of the invention.

[0263] “Variants” is intended to mean substantially similar sequences. For polynucleotides, a variant comprises a polynucleotide having deletions (i.e., truncations) at the 5′ and/or 3′ end; deletion and/or addition of one or more nucleotides at one or more internal sites in the native polynucleotide; and/or substitution of one or more nucleotides at one or more sites in the native polynucleotide. As used herein, a “native” polynucleotide or polypeptide comprises a naturally occurring nucleotide sequence or amino acid sequence, respectively. For polynucleotides, conservative variants include those sequences that, because of the degeneracy of the genetic code, encode the amino acid sequence of the proteins of the NLR genes of the present invention. Variant polynucleotides include synthetically derived polynucleotides, such as those generated, for example, by using site-directed mutagenesis but which still encode a functional NLR protein of the invention. Generally, variants of a polynucleotide of the invention will have at least about 80%, 85%, 90%, 91%, 92%, 93%, 94%, 95%, 96%, 97%, 98%, 99% or more sequence identity to that polynucleotide as determined by sequence alignment programs and parameters as described elsewhere herein.

[0264] Variants of a polynucleotide of the invention (i.e., the reference polynucleotide) can also be evaluated by comparison of the percent sequence identity between the polypeptide encoded by a variant polynucleotide and the polypeptide encoded by the reference polynucleotide. Percent sequence identity between any two polypeptides or between the corresponding parts (e.g. domains) of any two peptides can be calculated using sequence alignment programs and parameters described elsewhere herein. Where any given pair of polynucleotides of the invention or corresponding parts thereof is evaluated by comparison of the percent sequence identity shared by the two polypeptides they encode, the percent sequence identity between the two encoded polypeptides is at least about 50%, 55%, 60%, 65%, 70%, 75%, 80%, 85%, 86%, 87%, 88%, 89%, 90%, 91%, 92%, 93%, 94%, 95%, 96%, 97%, 98%, 99% or more sequence identity.

[0265] “Variant” protein is intended to mean a protein derived from the native protein by deletion (so-called truncation) of one or more amino acids at the N-terminal and/or C-terminal end of the native protein; deletion and/or addition of one or more amino acids at one or more internal sites in the native protein; or substitution of one or more amino acids at one or more sites in the native protein. A biologically active variant of a protein of the invention may differ from that protein by as few as 1-15 amino acid residues, as few as 1-10, such as 6-10, as few as 5, as few as 4, 3, 2, or even 1 amino acid residue. Biologically active variants of an NLR protein of the present invention will have at least about 80%, 85%, 86%, 87%, 88%, 89%, 90%, 91%, 92%, 93%, 94%, 95%, 96%, 97%, 98%, 99% or more sequence identity to the amino acid sequence of NLR protein of the present invention as determined by sequence alignment programs and parameters described elsewhere herein. A biologically active variant of an NLR protein of the invention or of a domain thereof may differ from that protein or domain by as few as 1-15 amino acid residues, as few as 1-10, such as 6-10, as few as 5, as few as 4, 3, 2, or even 1 amino acid residue.

[0266] The proteins of the invention may be altered in various ways including amino acid substitutions, deletions, truncations, and insertions. Methods for such manipulations are generally known in the art. Methods for mutagenesis and polynucleotide alterations are well known in the art. See, for example, Kunkel (1985) Proc. Natl. Acad. Sci. USA 82:488-492; Kunkel et al. (1987) Methods in Enzymol. 154:367-382; U.S. Pat. No. 4,873,192; Walker and Gaastra, eds. (1983) Techniques in Molecular Biology (MacMillan Publishing Company, New York) and the references cited therein. Guidance as to appropriate amino acid substitutions that do not affect biological activity of the protein of interest may be found in the model of Dayhoff et al. (1978) Atlas of Protein Sequence and Structure (Natl. Biomed. Res. Found., Washington, D.C.), herein incorporated by reference. Conservative substitutions, such as exchanging one amino acid with another having similar properties, may be optimal.

[0267] The deletions, insertions, and substitutions of the protein sequences encompassed herein are not expected to produce radical changes in the characteristics of the protein. However, when it is difficult to predict the exact effect of the substitution, deletion, or insertion in advance of doing so, one skilled in the art will appreciate that the effect will be evaluated by routine screening assays. That is, the activity can be evaluated by, for example, assays for disease resistance against a plant pathogen of interest as disclosed elsewhere herein or otherwise known in the art.

[0268] For example, a plant that is susceptible to a plant disease caused by a plant pathogen of interest can be transformed with a polynucleotide construct comprising an NLR gene of the present invention, regenerated into a transformed or transgenic plant comprising the polynucleotide constructs, and tested for resistance using standard disease resistance assays known in the art or described elsewhere herein.

[0269] Variant polynucleotides and proteins also encompass sequences and proteins derived from a mutagenic and recombinogenic procedure such as DNA shuffling. Strategies for such DNA shuffling are known in the art. See, for example, Stemmer (1994) Proc. Natl. Acad. Sci. USA 91:10747-10751; Stemmer (1994) Nature 370:389-391; Crameri et al. (1997) Nature Biotech. 15:436-438; Moore et al. (1997) J. Mol. Biol. 272:336-347; Zhang et al. (1997) Proc. Natl. Acad. Sci. USA 94:4504-4509; Crameri et al. (1998) Nature 391:288-291; and U.S. Pat. Nos. 5,605,793 and 5,837,458.

[0270] Preferably, the NLR genes of the present invention and the polynucleotides encoding them confer, or are capable of conferring, upon a plant comprising such an NLR gene, enhanced resistance to at least one plant pathogen, but preferably to two, three, four, five, or more plant pathogens.

[0271] PCR amplification can be used in certain embodiments of the methods of the present invention. Methods for designing PCR primers and PCR amplification are generally known in the art and are disclosed in Sambrook et al. (1989) Molecular Cloning: A Laboratory Manual (2d ed., Cold Spring Harbor Laboratory Press, Plainview, New York). See also Innis et al., eds. (1990) PCR Protocols: A Guide to Methods and Applications (Academic Press, New York); Innis and Gelfand, eds. (1995) PCR Strategies (Academic Press, New York); and Innis and Gelfand, eds. (1999) PCR Methods Manual (Academic Press, New York). Known methods of PCR amplification include, but are not limited to, methods using paired primers, nested primers, single specific primers, degenerate primers, gene-specific primers, vector-specific primers, partially mismatched primers, and the like.

[0272] It is recognized that the nucleic acid molecules of the NLR genes of the present invention encompass nucleic acid molecules comprising a variant nucleotide sequence that is sufficiently identical to the nucleotide sequence of an NLR gene of the present invention. The term “sufficiently identical” is used herein to refer to a first amino acid or nucleotide sequence that contains a sufficient or minimum number of identical or equivalent (e.g., with a similar side chain) amino acid residues or nucleotides to a second amino acid or nucleotide sequence such that the first and second amino acid or nucleotide sequences have a common structural domain(s) and/or common functional activity, such as, for example, disease resistance. For example, amino acid or nucleotide sequences that contain a common structural domain(s) and/or sequences having at least about 45%, 55%, or 65% identity, preferably 75% identity, more preferably 85%, 86%, 87%, 88%, 89%, 90%, 95%, 96%, 97%, 98% or 99% identity, can be as sufficiently identical.

[0273] To determine the percent identity of two amino acid sequences or of two nucleic acids, the sequences are aligned for optimal comparison purposes. The percent identity between the two sequences is a function of the number of identical positions shared by the sequences (i.e., percent identity=number of identical positions/total number of positions (e.g., overlapping positions)×100). In one embodiment, the two sequences are the same length. The percent identity between two sequences can be determined using techniques similar to those described below, with or without allowing gaps. In calculating percent identity, typically exact matches are counted.

[0274] The determination of percent identity between two sequences can be accomplished using a mathematical algorithm. A preferred, nonlimiting example of a mathematical algorithm utilized for the comparison of two sequences is the algorithm of Karlin and Altschul (1990) Proc. Natl. Acad. Sci. USA 87:2264, modified as in Karlin and Altschul (1993) Proc. Natl. Acad. Sci. USA 90:5873-5877. Such an algorithm is incorporated into the NBLAST and XBLAST programs of Altschul et al. (1990) J. Mol. Biol. 215:403. BLAST nucleotide searches can be performed with the NBLAST program, score=100, wordlength=12, to obtain nucleotide sequences homologous to the polynucleotide molecules of the invention. BLAST protein searches can be performed with the XBLAST program, score=50, wordlength=3, to obtain amino acid sequences homologous to protein molecules of the invention. To obtain gapped alignments for comparison purposes, Gapped BLAST can be utilized as described in Altschul et al. (1997) Nucleic Acids Res. 25:3389. Alternatively, PSI-Blast can be used to perform an iterated search that detects distant relationships between molecules. See Altschul et al. (1997) supra. When utilizing BLAST, Gapped BLAST, and PSI-Blast programs, the default parameters of the respective programs (e.g., XBLAST and NBLAST; available on the world-wide web at ncbi.nlm.nih.gov). Another preferred, non-limiting example of a mathematical algorithm utilized for the comparison of sequences is the algorithm of Myers and Miller (1988) CABIOS 4:11-17. Such an algorithm is incorporated into the ALIGN program (version 2.0), which is part of the GCG sequence alignment software package. When utilizing the ALIGN program for comparing amino acid sequences, a PAM120 weight residue table, a gap length penalty of 12, and a gap penalty of 4 can be used. Alignment may also be performed manually by inspection.

[0275] Unless otherwise stated, sequence identity/similarity values provided herein refer to the value obtained using the full-length sequences of the invention and using multiple alignment by mean of the algorithm Clustal W (Nucleic Acid Research, 22(22):4673-4680, 1994) using the program AlignX included in the software package Vector NTI Suite Version 7 (InforMax, Inc., Bethesda, MD, USA) using the default parameters; or any equivalent program thereof. By “equivalent program” is intended any sequence comparison program that, for any two sequences in question, generates an alignment having identical nucleotide or amino acid residue matches and an identical percent sequence identity when compared to the corresponding alignment generated by CLUSTALW (Version 1.83) using default parameters (available at the European Bioinformatics Institute website on the world-wide web at: ebi.ac.uk/Tools/clustalw/index.html).

[0276] The use of the term “polynucleotide” is not intended to limit the present invention to polynucleotides comprising DNA. Those of ordinary skill in the art will recognize that polynucleotides, can comprise ribonucleotides and combinations of ribonucleotides and deoxyribonucleotides. Such deoxyribonucleotides and ribonucleotides include both naturally occurring molecules and synthetic analogues. The polynucleotides of the invention also encompass all forms of sequences including, but not limited to, single-stranded forms, double-stranded forms, hairpins, stem-and-loop structures, and the like.

[0277] The polynucleotide constructs comprising NLR protein coding regions can be provided in expression cassettes for expression in the plant or other organism or in a host cell of interest. The cassette will include 5′ and 3′ regulatory sequences operably linked to the protein coding region. “Operably linked” is intended to mean a functional linkage between two or more elements. For example, an operable linkage between a polynucleotide or gene of interest and a regulatory sequence (i.e., a promoter) is functional link that allows for expression of the polynucleotide of interest. Operably linked elements may be contiguous or non-contiguous. When used to refer to the joining of two protein coding regions, by operably linked is intended that the coding regions are in the same reading frame. The cassette may additionally contain at least one additional gene to be cotransformed into the organism. Alternatively, the additional gene(s) can be provided on multiple expression cassettes. Such an expression cassette is provided with a plurality of restriction sites and/or recombination sites for insertion of the protein coding region to be under the transcriptional regulation of the regulatory regions. The expression cassette may additionally contain selectable marker genes.

[0278] The expression cassette will include in the 5′-3′ direction of transcription, a transcriptional and translational initiation region (i.e., a promoter), an NLR protein coding region of the invention, and a transcriptional and translational termination region (i.e., termination region) functional in plants or other organism or non-human host cell. The regulatory regions (i.e., promoters, transcriptional regulatory regions, and translational termination regions) and/or the NLR protein coding region or of the invention may be native/analogous to the host cell or to each other. Alternatively, the NLR gene, the regulatory regions and/or NLR protein coding region of the invention may be heterologous to the host cell or to each other.

[0279] As used herein, “heterologous” in reference to a nucleic acid molecule or nucleotide sequence that is present in a species of interest is a nucleic acid molecule or nucleotide sequence that originates from a different species than the species of interest and that is not introduced by introgression or other method that involves sexual reproduction, or, if from the same species, the nucleic acid molecule or nucleotide sequence that is present in a species of interest is modified from its native form in composition and/or genomic locus by deliberate human intervention. For example, a promoter operably linked to a heterologous polynucleotide is from a species different from the species from which the polynucleotide was derived, or, if from the same/analogous species, one or both are substantially modified from their original form and/or genomic locus, or the promoter is not the native promoter for the operably linked polynucleotide. As used herein, a chimeric gene or chimeric polynucleotide construct comprises a coding sequence operably linked to a transcription initiation region that is heterologous to the coding sequence.

[0280] The present invention provides host cells comprising at least of the nucleic acid molecules, expression cassettes, and vectors of the present invention. In preferred embodiments of the invention, a host cell is a plant cell. In other embodiments, a host cell is selected from the group consisting of a bacterium, a fungal cell, and an animal cell. In certain embodiments, a host cell is non-human animal cell. However, in some other embodiments, the host cell is an in-vitro cultured human cell.

[0281] The termination region may be native with the transcriptional initiation region, may be native with the operably linked NLR protein coding region of interest, may be native with the plant host, or may be derived from another source (i.e., foreign or heterologous to the promoter, the protein of interest, and/or the plant host), or any combination thereof. Convenient termination regions are available from the Ti-plasmid of A. tumefaciens, such as the octopine synthase and nopaline synthase termination regions. See also Guerineau et al. (1991) Mol. Gen. Genet. 262:141-144; Proudfoot (1991) Cell 64:671-674; Sanfacon et al. (1991) Genes Dev. 5:141-149; Mogen et al. (1990) Plant Cell 2:1261-1272; Munroe et al. (1990) Gene 91:151-158; Ballas et al. (1989) Nucleic Acids Res. 17:7891-7903; and Joshi et al. (1987) Nucleic Acids Res. 15:9627-9639.

[0282] Where appropriate, the polynucleotides may be optimized for increased expression in the transformed plant. That is, the polynucleotides can be synthesized using plant-preferred codons for improved expression. See, for example, Campbell and Gowri (1990) Plant Physiol. 92:1-11 for a discussion of host-preferred codon usage. Methods are available in the art for synthesizing plant-preferred genes. See, for example, U.S. Pat. Nos. 5,380,831, and 5,436,391, and Murray et al. (1989) Nucleic Acids Res. 17:477-498, herein incorporated by reference.

[0283] Additional sequence modifications are known to enhance gene expression in a cellular host. These include elimination of sequences encoding spurious polyadenylation signals, exon-intron splice site signals, transposon-like repeats, and other such well-characterized sequences that may be deleterious to gene expression. The G-C content of the sequence may be adjusted to levels average for a given cellular host, as calculated by reference to known genes expressed in the host cell. When possible, the sequence is modified to avoid predicted hairpin secondary mRNA structures.

[0284] Additionally, the polynucleotides can be modified to alter the amino acid sequences of the NLR proteins, for example, to improve translational efficiency, protein stability and/or any other desired property or properties, and/or to reduce any one or more undesirable properties, while improving or at least not reducing significantly the biological activity of the NLR proteins. For example, the polynucleotides can be modified to remove potential allergenic regions in the proteins encoded thereby. See, the AllergenOnline database for a comprehensive list of known and putative allergens (Goodman et al. (2016) Mol. Nutr. Food Res. 60(5):1183-1198; available on the World Wide Web at: allergenonline.org).

[0285] The expression cassettes may additionally contain 5′ leader sequences. Such leader sequences can act to enhance translation. Translation leaders are known in the art and include: picornavirus leaders, for example, EMCV leader (Encephalomyocarditis 5′ noncoding region) (Elroy-Stein et al. (1989) Proc. Natl. Acad. Sci. USA 86:6126-6130); potyvirus leaders, for example, TEV leader (Tobacco Etch Virus) (Gallie et al. (1995) Gene 165(2):233-238), MDMV leader (Maize Dwarf Mosaic Virus) (Virology 154:9-20), and human immunoglobulin heavy-chain binding protein (BiP) (Macejak et al. (1991) Nature 353:90-94); untranslated leader from the coat protein mRNA of alfalfa mosaic virus (AMV RNA 4) (Jobling et al. (1987) Nature 325:622-625); tobacco mosaic virus leader (TMV) (Gallie et al. (1989) in Molecular Biology of RNA, ed. Cech (Liss, New York), pp. 237-256); and maize chlorotic mottle virus leader (MCMV) (Lommel et al. (1991) Virology 81:382-385). See also, Della-Cioppa et al. (1987) Plant Physiol. 84:965-968.

[0286] In preparing the expression cassette, the various DNA fragments may be manipulated, so as to provide for the DNA sequences in the proper orientation and, as appropriate, in the proper reading frame. Toward this end, adapters (also referred to as “adaptors) or linkers may be employed to join the DNA fragments or other manipulations may be involved to provide for convenient restriction sites, removal of superfluous DNA, removal of restriction sites, or the like. For this purpose, in vitro mutagenesis, primer repair, restriction, annealing, resubstitutions, e.g., transitions and transversions, may be involved.

[0287] A number of promoters can be used in the practice of the invention. The promoters can be selected based on the desired outcome. The nucleic acids can be combined with constitutive, tissue-preferred, or other promoters for expression in plants. Such constitutive promoters include, for example, the core CaMV 35S promoter (Odell et al. (1985) Nature 313:810-812); rice actin (McElroy et al. (1990) Plant Cell 2:163-171); ubiquitin (Christensen et al. (1989) Plant Mol. Biol. 12:619-632 and Christensen et al. (1992) Plant Mol. Biol. 18:675-689); pEMU (Last et al. (1991) Theor. Appl. Genet. 81:581-588); MAS (Velten et al. (1984) EMBO J. 3:2723-2730); ALS promoter (U.S. Pat. No. 5,659,026), and the like. Other constitutive promoters include, for example, U.S. Pat. Nos. 5,608,149; 5,608,144; 5,604,121; 5,569,597; 5,466,785; 5,399,680; 5,268,463; 5,608,142; and 6,177,611.

[0288] Tissue-preferred promoters can be utilized to target enhanced expression of the R protein coding sequences within a particular plant tissue. Such tissue-preferred promoters include, but are not limited to, leaf-preferred promoters, root-preferred promoters, seed-preferred promoters, and stem-preferred promoters. Tissue-preferred promoters include Yamamoto et al. (1997) Plant J. 12(2):255-265; Kawamata et al. (1997) Plant Cell Physiol. 38(7):792-803; Hansen et al. (1997) Mol. Gen Genet. 254(3):337-343; Russell et al. (1997) Transgenic Res. 6(2):157-168; Rinehart et al. (1996) Plant Physiol. 112(3):1331-1341; Van Camp et al. (1996) Plant Physiol. 112(2):525-535; Canevascini et al. (1996) Plant Physiol. 112(2):513-524; Yamamoto et al. (1994) Plant Cell Physiol. 35(5):773-778; Lam (1994) Results Probl. Cell Differ. 20:181-196; Orozco et al. (1993) Plant Mol Biol. 23(6):1129-1138; Matsuoka et al. (1993) Proc Natl. Acad. Sci. USA 90(20):9586-9590; and Guevara-Garcia et al. (1993) Plant J. 4(3):495-505. Such promoters can be modified, if necessary, for weak expression.

[0289] The transgene can be expressed using an inducible promoter, such as, for example, a pathogen-inducible promoter. Such promoters include those from pathogenesis-related proteins (PR proteins), which are induced following infection by a pathogen; e.g., PR proteins, SAR proteins, beta-1,3-glucanase, chitinase, etc. See, for example, Redolfi et al. (1983) Neth. J. Plant Pathol. 89:245-254; Uknes et al. (1992) Plant Cell 4:645-656; and Van Loon (1985) Plant Mol. Virol. 4:111-116. See also WO 99/43819, herein incorporated by reference.

[0290] Of interest are promoters that are expressed locally at or near the site of pathogen infection. See, for example, Marineau et al. (1987) Plant Mol. Biol. 9:335-342; Matton et al. (1989) Molecular Plant-Microbe Interactions 2:325-331; Somsisch et al. (1986) Proc. Natl. Acad. Sci. USA 83:2427-2430; Somsisch et al. (1988) Mol. Gen. Genet. 2:93-98; and Yang (1996) Proc. Natl. Acad. Sci. USA 93:14972-14977. See also, Chen et al. (1996) Plant J. 10:955-966; Zhang et al. (1994) Proc. Natl. Acad. Sci. USA 91:2507-2511; Warner et al. (1993) Plant J. 3:191-201; Siebertz et al. (1989) Plant Cell 1:961-968; U.S. Pat. No. 5,750,386 (nematode-inducible); and the references cited therein. Of particular interest is the inducible promoter for the maize PRms gene, whose expression is induced by the pathogen Fusarium moniliforme (see, for example, Cordero et al. (1992) Physiol. Mol. Plant Path. 41:189-200).

[0291] Additionally, as pathogens find entry into plants through wounds or insect damage, a wound-inducible promoter may be used in the constructions of the invention. Such wound-inducible promoters include potato proteinase inhibitor (pin II) gene (Ryan (1990) Ann. Rev. Phytopath. 28:425-449; Duan et al. (1996) Nature Biotechnology 14:494-498); wun1 and wun2, U.S. Pat. No. 5,428,148; win1 and win2 (Stanford et al. (1989) Mol. Gen. Genet. 215:200-208); systemin (McGurl et al. (1992) Science 225:1570-1573); WIP1 (Rohmeier et al. (1993) Plant Mol. Biol. 22:783-792; Eckelkamp et al. (1993) FEBS Letters 323:73-76); MPI gene (Corderok et al. (1994) Plant J. 6(2): 141-150); and the like, herein incorporated by reference.

[0292] Chemical-regulated promoters can be used to modulate the expression of a gene in a plant through the application of an exogenous chemical regulator. Depending upon the objective, the promoter may be a chemical-inducible promoter, where application of the chemical induces gene expression, or a chemical-repressible promoter, where application of the chemical represses gene expression. Chemical-inducible promoters are known in the art and include, but are not limited to, the maize In2-2 promoter, which is activated by benzenesulfonamide herbicide safeners, the maize GST promoter, which is activated by hydrophobic electrophilic compounds that are used as pre-emergent herbicides, and the tobacco PR-la promoter, which is activated by salicylic acid. Other chemical-regulated promoters of interest include steroid-responsive promoters (see, for example, the glucocorticoid-inducible promoter in Schena et al. (1991) Proc. Natl. Acad. Sci. USA 88:10421-10425 and McNellis et al. (1998) Plant J. 14(2):247-257) and tetracycline-inducible and tetracycline-repressible promoters (see, for example, Gatz et al. (1991) Mol. Gen. Genet. 227:229-237, and U.S. Pat. Nos. 5,814,618 and 5,789,156), herein incorporated by reference.

[0293] The expression cassette can also comprise a selectable marker gene for the selection of transformed cells. Selectable marker genes are utilized for the selection of transformed cells or tissues. Marker genes include genes encoding antibiotic resistance, such as those encoding neomycin phosphotransferase II (NEO) and hygromycin phosphotransferase (HPT), as well as genes conferring resistance to herbicidal compounds, such as glufosinate ammonium, bromoxynil, imidazolinones, and 2,4-dichlorophenoxyacetate (2,4-D). Additional selectable markers include phenotypic markers such as β-galactosidase and fluorescent proteins such as green fluorescent protein (GFP) (Su et al. (2004) Biotechnol Bioeng 85:610-9 and Fetter et al. (2004) Plant Cell 16:215-28), cyan florescent protein (CYP) (Bolte et al. (2004) J. Cell Science 117:943-54 and Kato et al. (2002) Plant Physiol 129:913-42), and yellow florescent protein (PhiYFP™ from Evrogen, see, Bolte et al. (2004) J. Cell Science 117:943-54). For additional selectable markers, see generally, Yarranton (1992) Curr. Opin. Biotech. 3:506-511; Christopherson et al. (1992) Proc. Natl. Acad. Sci. USA 89:6314-6318; Yao et al. (1992) Cell 71:63-72; Reznikoff (1992) Mol. Microbiol. 6:2419-2422; Barkley et al. (1980) in The Operon, pp. 177-220; Hu et al. (1987) Cell 48:555-566; Brown et al. (1987) Cell 49:603-612; Figge et al. (1988) Cell 52:713-722; Deuschle et al. (1989) Proc. Natl. Acad. Sci. USA 86:5400-5404; Fuerst et al. (1989) Proc. Natl. Acad. Sci. USA 86:2549-2553; Deuschle et al. (1990) Science 248:480-483; Gossen (1993) Ph.D. Thesis, University of Heidelberg; Reines et al. (1993) Proc. Natl. Acad. Sci. USA 90:1917-1921; Labow et al. (1990) Mol. Cell. Biol. 10:3343-3356; Zambretti et al. (1992) Proc. Natl. Acad. Sci. USA 89:3952-3956; Baim et al. (1991) Proc. Natl. Acad. Sci. USA 88:5072-5076; Wyborski et al. (1991) Nucleic Acids Res. 19:4647-4653; Hillenand-Wissman (1989) Topics Mol. Struc. Biol. 10:143-162; Degenkolb et al. (1991) Antimicrob. Agents Chemother. 35:1591-1595; Kleinschmidt et al. (1988) Biochemistry 27:1094-1104; Bonin (1993) Ph.D. Thesis, University of Heidelberg; Gossen et al. (1992) Proc. Natl. Acad. Sci. USA 89:5547-5551; Oliva et al. (1992) Antimicrob. Agents Chemother. 36:913-919; Hlavka et al. (1985) Handbook of Experimental Pharmacology, Vol. 78 (Springer-Verlag, Berlin); Gill et al. (1988) Nature 334:721-724. Such disclosures are herein incorporated by reference.

[0294] The above list of selectable marker genes is not intended to be limiting. Any selectable marker gene can be used in the present invention.

[0295] Numerous plant transformation vectors and methods for transforming plants are available. See, for example, An, G. et al. (1986) Plant Pysiol., 81:301-305; Fry, J., et al. (1987) Plant Cell Rep. 6:321-325; Block, M. (1988) Theor. Appl Genet. 76:767-774; Hinchee, et al. (1990) Stadler. Genet. Symp. 203212.203-212; Cousins, et al. (1991) Aust. J. Plant Physiol. 18:481-494; Chee, P. P. and Slightom, J. L. (1992) Gene. 118:255-260; Christou, et al. (1992) Trends. Biotechnol. 10:239-246; D'Halluin, et al. (1992) Bio/Technol. 10:309-314; Dhir, et al. (1992) Plant Physiol. 99:81-88; Casas et al. (1993) Proc. Nat. Acad Sci. USA 90:11212-11216; Christou, P. (1993) In Vitro Cell. Dev. Biol.—Plant; 29P: 119-124; Davies, et al. (1993) Plant Cell Rep. 12:180-183; Dong, J. A. and Mchughen, A. (1993) Plant Sci. 91:139-148; Franklin, C. I. and Trieu, T. N. (1993) Plant. Physiol. 102: 167; Golovkin, et al. (1993) Plant Sci. 90:41-52; Guo Chin Sci. Bull. 38:2072-2078; Asano, et al. (1994) Plant Cell Rep. 13; Ayeres N. M. and Park, W. D. (1994) Crit. Rev. Plant. Sci. 13:219-239; Barcelo, et al. (1994) Plant. J. 5:583-592; Becker, et al. (1994) Plant. J. 5:299-307; Borkowska et al. (1994) Acta. Physiol Plant. 16:225-230; Christou, P. (1994) Agro. Food. Ind. Hi Tech. 5: 17-27; Eapen et al. (1994) Plant Cell Rep. 13:582-586; Hartman, et al. (1994) Bio-Technology 12: 919923; Ritala, et al. (1994) Plant. Mol. Biol. 24:317-325; and Wan, Y. C. and Lemaux, P. G. (1994) Plant Physiol. 104:3748.

[0296] Plant transformation vectors that find use in the present invention include, for example, T-DNA vectors or plasmids, which are suitable for use in Agrobacterium-mediated transformation methods that are disclosed elsewhere herein or otherwise known in the art.

[0297] The methods of the invention involve introducing a polynucleotide construct into a plant. By “introducing” is intended presenting to the plant the polynucleotide construct in such a manner that the construct gains access to the interior of a cell of the plant. The methods of the invention do not depend on a particular method for introducing a polynucleotide construct to a plant, only that the polynucleotide construct gains access to the interior of at least one cell of the plant. Methods for introducing polynucleotide constructs into plants are known in the art including, but not limited to, stable transformation methods, transient transformation methods, and virus-mediated methods.

[0298] By “stable transformation” is intended that the polynucleotide construct introduced into a plant integrates into the genome of the plant and is capable of being inherited by progeny thereof. By “transient transformation” is intended that a polynucleotide construct introduced into a plant does not integrate into the genome of the plant.

[0299] For the transformation of plants and plant cells, the nucleotide sequences of the invention are inserted using standard techniques into any vector known in the art that is suitable for expression of the nucleotide sequences in a plant or plant cell. The selection of the vector depends on the preferred transformation technique and the target plant species to be transformed.

[0300] Methodologies for constructing plant expression cassettes and introducing foreign nucleic acids into plants are generally known in the art and have been previously described. For example, foreign DNA can be introduced into plants, using tumor-inducing (Ti) plasmid vectors. Other methods utilized for foreign DNA delivery involve the use of PEG mediated protoplast transformation, electroporation, microinjection whiskers, and biolistics or microprojectile bombardment for direct DNA uptake. Such methods are known in the art. (U.S. Pat. No. 5,405,765 to Vasil et al.; Bilang et al. (1991) Gene 100: 247-250; Scheid et al., (1991) Mol. Gen. Genet., 228: 104-112; Guerche et al., (1987) Plant Science 52: 111-116; Neuhause et al., (1987) Theor. Appl Genet. 75: 30-36; Klein et al., (1987) Nature 327: 70-73; Howell et al., (1980) Science 208:1265; Horsch et al., (1985) Science 227: 1229-1231; DeBlock et al., (1989) Plant Physiology 91: 694-701; Methods for Plant Molecular Biology (Weissbach and Weissbach, eds.) Academic Press, Inc. (1988) and Methods in Plant Molecular Biology (Schuler and Zielinski, eds.) Academic Press, Inc. (1989). The method of transformation depends upon the plant cell to be transformed, stability of vectors used, expression level of gene products and other parameters.

[0301] Other suitable methods of introducing nucleotide sequences into plant cells and subsequent insertion into the plant genome include microinjection as Crossway et al. (1986) Biotechniques 4:320-334, electroporation as described by Riggs et al. (1986) Proc. Natl. Acad. Sci. USA 83:5602-5606, Agrobacterium-mediated transformation as described by Townsend et al., U.S. Pat. No. 5,563,055, Zhao et al., U.S. Pat. No. 5,981,840, direct gene transfer as described by Paszkowski et al. (1984) EMBO J. 3:2717-2722, and ballistic particle acceleration as described in, for example, Sanford et al., U.S. Pat. No. 4,945,050; Tomes et al., U.S. Pat. No. 5,879,918; Tomes et al., U.S. Pat. No. 5,886,244; Bidney et al., U.S. Pat. No. 5,932,782; Tomes et al. (1995) “Direct DNA Transfer into Intact Plant Cells via Microprojectile Bombardment,” in Plant Cell, Tissue, and Organ Culture: Fundamental Methods, ed. Gamborg and Phillips (Springer-Verlag, Berlin); McCabe et al. (1988) Biotechnology 6:923-926); and Lec1 transformation (WO 00/28058). Also see, Weissinger et al. (1988) Ann. Rev. Genet. 22:421-477; Sanford et al. (1987) Particulate Science and Technology 5:27-37 (onion); Christou et al. (1988) Plant Physiol. 87:671-674 (soybean); McCabe et al. (1988) Bio/Technology 6:923-926 (soybean); Finer and McMullen (1991) In Vitro Cell Dev. Biol. 27P: 175-182 (soybean); Singh et al. (1998) Theor. Appl. Genet. 96:319-324 (soybean); Datta et al. (1990) Biotechnology 8:736-740 (rice); Klein et al. (1988) Proc. Natl. Acad. Sci. USA 85:4305-4309 (maize); Klein et al. (1988) Biotechnology 6:559-563 (maize); Tomes, U.S. Pat. No. 5,240,855; Buising et al., U.S. Pat. Nos. 5,322,783 and 5,324,646; Tomes et al. (1995) “Direct DNA Transfer into Intact Plant Cells via Microprojectile Bombardment,” in Plant Cell, Tissue, and Organ Culture: Fundamental Methods, ed. Gamborg (Springer-Verlag, Berlin) (maize); Klein et al. (1988) Plant Physiol. 91:440-444 (maize); Fromm et al. (1990) Biotechnology 8:833-839 (maize); Hooykaas-Van Slogteren et al. (1984) Nature (London) 311:763-764; Bowen et al., U.S. Pat. No. 5,736,369 (cereals); Bytebier et al. (1987) Proc. Natl. Acad. Sci. USA 84:5345-5349 (Liliaceae); De Wet et al. (1985) in The Experimental Manipulation of Ovule Tissues, ed. Chapman et al. (Longman, New York), pp. 197-209 (pollen); Kaeppler et al. (1990) Plant Cell Reports 9:415-418 and Kaeppler et al. (1992) Theor. Appl. Genet. 84:560-566 (whisker-mediated transformation); D'Halluin et al. (1992) Plant Cell 4:1495-1505 (electroporation); Li et al. (1993) Plant Cell Reports 12:250-255 and Christou and Ford (1995) Annals of Botany 75:407-413 (rice); Osjoda et al. (1996) Nature Biotechnology 14:745-750 (maize via Agrobacterium tumefaciens); all of which are herein incorporated by reference.

[0302] The polynucleotides of the invention may be introduced into plants by contacting plants with a virus or viral nucleic acids. Generally, such methods involve incorporating a polynucleotide construct of the invention within a viral DNA or RNA molecule. Further, it is recognized that promoters of the invention also encompass promoters utilized for transcription by viral RNA polymerases. Methods for introducing polynucleotide constructs into plants and expressing a protein encoded therein, involving viral DNA or RNA molecules, are known in the art. See, for example, U.S. Pat. Nos. 5,889,191, 5,889,190, 5,866,785, 5,589,367 and 5,316,931; herein incorporated by reference.

[0303] If desired, the modified viruses or modified viral nucleic acids can be prepared in formulations. Such formulations are prepared in a known manner (see e.g. for review U.S. Pat. No. 3,060,084, EP-A 707 445 (for liquid concentrates), Browning, “Agglomeration”, Chemical Engineering, Dec. 4, 1967, 147-48, Perry's Chemical Engineer's Handbook, 4th Ed., McGraw-Hill, New York, 1963, pages 8-57 and et seq. WO 91/13546, U.S. Pat. Nos. 4,172,714, 4,144,050, 3,920,442, 5,180,587, 5,232,701, 5,208,030, GB 2,095,558, U.S. Pat. No. 3,299,566, Klingman, Weed Control as a Science, John Wiley and Sons, Inc., New York, 1961, Hance et al. Weed Control Handbook, 8th Ed., Blackwell Scientific Publications, Oxford, 1989 and Mollet, H., Grubemann, A., Formulation technology, Wiley VCH Verlag GmbH, Weinheim (Germany), 2001, 2. D. A. Knowles, Chemistry and Technology of Agrochemical Formulations, Kluwer Academic Publishers, Dordrecht, 1998 (ISBN 0-7514-0443-8), for example by extending the active compound with auxiliaries suitable for the formulation of agrochemicals, such as solvents and/or carriers, if desired emulsifiers, surfactants and dispersants, preservatives, antifoaming agents, anti-freezing agents, for seed treatment formulation also optionally colorants and/or binders and/or gelling agents.

[0304] In specific embodiments, the polynucleotide constructs and expression cassettes of the invention can be provided to a plant using a variety of transient transformation methods known in the art. Such methods include, for example, microinjection or particle bombardment. See, for example, Crossway et al. (1986) Mol Gen. Genet. 202:179-185; Nomura et al. (1986) Plant Sci. 44:53-58; Hepler et al. (1994) PNAS Sci. 91: 2176-2180 and Hush et al. (1994) J. Cell Science 107:775-784, all of which are herein incorporated by reference. Alternatively, the polynucleotide can be transiently transformed into the plant using techniques known in the art. Such techniques include viral vector system and Agrobacterium tumefaciens-mediated transient expression as described elsewhere herein.

[0305] The cells that have been transformed may be grown into plants in accordance with conventional ways. See, for example, McCormick et al. (1986) Plant Cell Reports 5:81-84. These plants may then be grown, and either pollinated with the same transformed strain or different strains, and the resulting hybrid having constitutive expression of the desired phenotypic characteristic identified. Two or more generations may be grown to ensure that expression of the desired phenotypic characteristic is stably maintained and inherited and then seeds harvested to ensure expression of the desired phenotypic characteristic has been achieved. In this manner, the present invention provides transformed seed (also referred to as “transgenic seed”) having a polynucleotide construct of the invention, for example, an expression cassette of the invention, stably incorporated into their genome.

[0306] Such methods known in the art for modifying DNA in the genome of a plant include, for example, mutation breeding and genome editing techniques, such as, for example, methods involving targeted mutagenesis, site-directed integration (SDI), and homologous recombination. Targeted mutagenesis or similar techniques are disclosed in U.S. Pat. Nos. 5,565,350; 5,731,181; 5,756,325; 5,760,012; 5,795,972, 5,871,984, and 8,106,259; all of which are herein incorporated in their entirety by reference. Methods for gene modification or gene replacement comprising homologous recombination can involve inducing single-strand or double-strand breaks in DNA using zinc-finger nucleases (ZFN), TAL (transcription activator-like) effector nucleases (TALEN), Clustered Regularly Interspaced Short Palindromic Repeats/CRISPR-associated nuclease (CRISPR/Cas nuclease), or homing endonucleases that have been engineered endonucleases to make double-strand breaks at specific recognition sequences in the genome of a plant, other organism, or host cell. See, for example, Durai et al., (2005) Nucleic Acids Res. 33:5978-90; Mani et al. (2005) Biochem. Biophys. Res. Comm 335:447-57; U.S. Pat. Nos. 7,163,824, 7,001,768, and 6,453,242; Arnould et al. (2006) J Mol. Biol. 355:443-58; Ashworth et al., (2006) Nature 441:656-9; Doyon et al. (2006) J Am Chem Soc 128:2477-84; Rosen et al., (2006) Nucleic Acids Res. 34:4791-800; and Smith et al., (2006) Nucleic Acids Res. 34:e149; U.S. Pat. App. Pub. No. 2009/0133152; and U.S. Pat. App. Pub. No. 2007/0117128; all of which are herein incorporated in their entirety by reference.

[0307] TAL effector nucleases (TALENs) can be used to make double-strand breaks at specific recognition sequences in the genome of a plant for gene modification or gene replacement through homologous recombination. TAL effector nucleases are a class of sequence-specific nucleases that can be used to make double-strand breaks at specific target sequences in the genome of a plant or other organism. TAL effector nucleases are created by fusing a native or engineered transcription activator-like (TAL) effector, or functional part thereof, to the catalytic domain of an endonuclease, such as, for example, FokI. The unique, modular TAL effector DNA binding domain allows for the design of proteins with potentially any given DNA recognition specificity. Thus, the DNA binding domains of the TAL effector nucleases can be engineered to recognize specific DNA target sites and thus, used to make double-strand breaks at desired target sequences. See, WO 2010/079430; Morbitzer et al. (2010) PNAS 10.1073/pnas. 1013133107; Scholze and Boch (2010) Virulence 1:428-432; Christian et al. Genetics (2010) 186:757-761; Li et al. (2010) Nuc. Acids Res. (2010) doi:10.1093/nar/gkq704; and Miller et al. (2011) Nature Biotechnology 29:143-148; all of which are herein incorporated by reference.

[0308] The CRISPR/Cas nuclease system can also be used to make single-strand or double-strand breaks at specific recognition sequences in the genome of a plant for gene modification or gene replacement through homologous recombination. The CRISPR/Cas nuclease is an RNA-guided (simple guide RNA, sgRNA in short) DNA endonuclease system performing sequence-specific double-stranded breaks in a DNA segment homologous to the designed RNA. It is possible to design the specificity of the sequence (Cho S. W. et al., Nat. Biotechnol. 31:230-232, 2013; Cong L. et al., Science 339:819-823, 2013; Mali P. et al., Science 339:823-826, 2013; Feng Z. et al., Cell Research: 1-4, 2013).

[0309] In addition, a ZFN can be used to make double-strand breaks at specific recognition sequences in the genome of a plant for gene modification or gene replacement through homologous recombination. The Zinc Finger Nuclease (ZFN) is a fusion protein comprising the part of the FokI restriction endonuclease protein responsible for DNA cleavage and a zinc finger protein which recognizes specific, designed genomic sequences and cleaves the double-stranded DNA at those sequences, thereby producing free DNA ends (Urnov F. D. et al., Nat Rev Genet. 11:636-46, 2010; Carroll D., Genetics. 188:773-82, 2011).

[0310] Breaking DNA using site specific nucleases, such as, for example, those described herein above, can increase the rate of homologous recombination in the region of the breakage. Thus, coupling of such effectors as described above with nucleases enables the generation of targeted changes in genomes which include additions, deletions and other modifications.

[0311] Unless expressly stated or apparent from the context of usage, the methods and compositions of the present invention can be used with any plant species including, for example, monocotyledonous plants (“monocots”), dicotyledonous plants (“dicots”), and conifers. Examples of plant species of interest include, but are not limited to, corn (Zea mays), Brassica sp. (e.g., B. napus, B. rapa, B. juncea), particularly those Brassica species useful as sources of seed oil, alfalfa (Medicago sativa), rice (Oryza sativa), rye (Secale cereale), triticale (x Triticosecale or Triticum x Secale) sorghum (Sorghum bicolor, Sorghum vulgare), teff (Eragrostis tef), millet (e.g., pearl millet (Pennisetum glaucum), proso millet (Panicum miliaceum), foxtail millet (Setaria italica), finger millet (Eleusine coracana)), switchgrass (Panicum virgatum), sunflower (Helianthus annuus), safflower (Carthamus tinctorius), wheat (Triticum aestivum), soybean (Glycine max), tobacco (Nicotiana tabacum), potato (Solanum tuberosum), peanuts (Arachis hypogaea), cotton (Gossypium barbadense, Gossypium hirsutum), strawberry (e.g. Fragaria x ananassa, Fragaria vesca, Fragaria moschata, Fragaria virginiana, Fragaria chiloensis), sweet potato (Ipomoea batatus), yam (Dioscorea spp., D. rotundata, D. cayenensis, D. alata, D. polystachya, D. bulbifera, D. esculenta, D. dumetorum, D. trifida), cassava (Manihot esculenta), coffee (Coffea spp.), coconut (Cocos nucifera), oil palm (e.g. Elaeis guineensis, Elaeis oleifera), pineapple (Ananas comosus), citrus trees (Citrus spp.), cocoa (Theobroma cacao), tea (Camellia sinensis), banana (Musa spp.), avocado (Persea americana), fig (Ficus casica), guava (Psidium guajava), mango (Mangifera indica), olive (Olea europaea), papaya (Carica papaya), cashew (Anacardium occidentale), macadamia (Macadamia integrifolia), almond (Prunus amygdalus), date (Phoenix dactylifera), cultivated forms of Beta vulgaris (sugar beets, garden beets, chard or spinach beet, mangelwurzel or fodder beet), sugarcane (Saccharum spp.), oat (Avena sativa), barley (Hordeum vulgare), cannabis (Cannabis sativa, C. indica, C. ruderalis), poplar (Populus spp.), eucalyptus (Eucalyptus spp.), Arabidopsis thaliana, Arabidopsis rhizogenes, Nicotiana benthamiana, Brachypodium distachyon vegetables, ornamentals, and conifers and other trees. In specific embodiments, plants of the present invention are crop plants (e.g. maize, sorghum, wheat, millet, rice, barley, oats, sugarcane, alfalfa, soybean, peanut, sunflower, cotton, safflower, Brassica spp., lettuce, strawberry, apple, citrus, etc.).

[0312] Vegetables include tomatoes (Lycopersicon esculentum), eggplant (also known as “aubergine” or “brinjal”) (Solanum melongena), pepper (Capsicum annuum), lettuce (e.g., Lactuca sativa), green beans (Phaseolus vulgaris), lima beans (Phaseolus limensis), peas (Lathyrus spp.), chickpeas (Cicer arietinum), and members of the genus Cucumis such as cucumber (C. sativus), cantaloupe (C. cantalupensis), and musk melon (C. melo). Ornamentals include azalea (Rhododendron spp.), hydrangea (Macrophylla hydrangea), hibiscus (Hibiscus rosasanensis), roses (Rosa spp.), tulips (Tulipa spp.), daffodils (Narcissus spp.), petunias (Petunia hybrida), carnation (Dianthus caryophyllus), poinsettia (Euphorbia pulcherrima), and chrysanthemum. Fruit trees and related plants include, for example, apples, pears, peaches, plums, oranges, grapefruits, limes, pomelos, palms, and bananas. Nut trees and related plants include, for example, almonds, cashews, walnuts, pistachios, macadamia nuts, filberts, hazelnuts, and pecans.

[0313] In specific embodiments, the plants of the present invention are crop plants such as, for example, maize (corn), soybean, wheat, rice, cotton, alfalfa, sunflower, canola (Brassica spp., particularly Brassica napus, Brassica rapa, Brassica juncea), rapeseed (Brassica napus), sorghum, millet, barley, triticale, safflower, peanut, sugarcane, tobacco, potato, tomato, and pepper.

[0314] In some preferred embodiments, the methods and compositions of the present invention can be used to enhance the resistance of a crop plants, particularly domesticated wheat plants, to one or more of the following diseases of wheat: wheat stem rust caused by Puccinia graminis f. sp. tritici), wheat stripe rust caused by Puccinia striiformis f. sp. tritici, wheat leaf rust caused by Puccinia triticina and wheat blast caused by Magnaporthe oryzae Triticum. Domesticated wheat plants include, but are not limited to, common wheat or bread wheat (Triticum aestivum), durham wheat (Triticum durum or Triticum turgidum subsp. durum), einkorn wheat (Triticum monococcum), spelt (Triticum spelta), emmer wheat (Triticum turgidum subsp. Dicoccum; Triticum turgidum conv. durum), and khorasan wheat (Triticum turgidum ssp. Turanicum or Triticum turanicum).

[0315] The term “plant” is intended to encompass plants at any stage of maturity or development, as well as any cells, tissues or organs (plant parts) taken or derived from any such plant unless otherwise clearly indicated by context. Plant parts include, but are not limited to, fruits, stems, tubers, roots, flowers, ovules, stamens, petals, leaves, hypocotyls, epicotyls, cotyledons, embryos, meristematic regions, callus tissue, anther cultures, gametophytes, sporophytes, pollen, microspores, protoplasts, seeds, and the like. It is recognized that the plant protoplasts of the present invention can be prepared from any one or more of the aforementioned plant parts and at any stage of development and/or maturity.

[0316] Likewise, the term “plant cell” is intended to encompass plant cells obtained from or in plants at any stage of maturity or development unless otherwise clearly indicated by context. Plant cells can be from or in plant parts including, but are not limited to, fruits, stems, tubers, roots, flowers, ovules, stamens, leaves, embryos, meristematic regions, callus tissue, anther cultures, gametophytes, sporophytes, pollen, microspores, in vitro-cultured tissues, organs or cells and the like.

[0317] Progeny, variants, and mutants of the regenerated plants are also included within the scope of the invention, provided that these parts comprise the introduced polynucleotides. As used herein, “progeny” and “progeny plant” comprise any subsequent generation of a plant whether resulting from sexual reproduction and/or asexual propagation, unless it is expressly stated otherwise or is apparent from the context of usage.

[0318] The term “expression” as used herein refers to the biosynthesis of a gene product, including the transcription and/or translation of said gene product. The “expression” or “production” of a protein or polypeptide from a DNA molecule refers to the transcription and translation of the coding sequence to produce the protein or polypeptide, while the “expression” or “production” of a protein or polypeptide from an RNA molecule refers to the translation of the RNA coding sequence to produce the protein or polypeptide. Preferably, for the methods of the present invention unless stated otherwise or apparent from the context of usage, an NLR is an expressed NLR in a plant, a plant organ, or other plant part if mRNA (i.e. transcripts) of the NLR is detected in the plant, the plant organ, or the other plant part.

[0319] The use of the terms “DNA” or “RNA” herein is not intended to limit the present invention to polynucleotide molecules comprising DNA or RNA. Those of ordinary skill in the art will recognize that the methods and compositions of the invention encompass nucleic acid molecules, polynucleotides, polynucleotide constructs, expression cassettes, and vectors comprised of deoxyribonucleotides (i.e., DNA), ribonucleotides (i.e., RNA) or combinations of ribonucleotides and deoxyribonucleotides. Such deoxyribonucleotides and ribonucleotides include both naturally occurring molecules and synthetic analogues including, but not limited to, nucleotide analogs or modified backbone residues or linkages, which are synthetic, naturally occurring, and non-naturally occurring, which have similar binding properties as the reference nucleic acid, and which are metabolized in a manner similar to the reference nucleotides. Examples of such analogs include, without limitation, phosphorothioates, phosphoramidates, methyl phosphonates, chiral-methyl phosphonates, 2-O-methyl ribonucleotides, peptide-nucleic acids (PNAs). The polynucleotide molecules of the invention also encompass all forms of polynucleotide molecules including, but not limited to, single-stranded forms, double-stranded forms, hairpins, stem-and-loop structures, and the like. Furthermore, it is understood by those of ordinary skill in the art that the nucleotide sequences disclosed herein also encompasses the complement of that exemplified nucleotide sequence.

[0320] The invention is drawn to compositions and methods for producing a plant with enhanced resistance to a plant disease caused by one, two, three, four or more plant pathogens. By “resistance to a plant disease” or “disease resistance” is intended that the plants avoid the disease symptoms that are the outcome of plant-pathogen interactions. That is, one or more pathogens are prevented from causing a plant disease or plant diseases and the associated disease symptoms, or alternatively, the disease symptoms caused by the one or more pathogens is minimized or lessened.

[0321] While the methods of method for preparing a library of candidate R genes and methods of identifying R genes have been largely described for R genes against plant pathogens that cause plant disease to plant of the interest, the methods of the present invention are broadly applicable to R genes against any plant pest including, but not limited to, plant pathogens (e.g. fungi, oomycetes, bacteria, viruses, and nematodes) and insects, and acarids that cause damage to plants. Thus, the term “plant pathogen” as used herein encompasses any plant pest unless expressly stated or apparent from the context of usage. Similarly, term “plant disease” or “disease” as used herein encompasses any damage caused to a plant by a plant pest unless expressly stated or apparent from the context of usage.

[0322] Plant pathogens include, for example, bacteria, fungi, oomycetes, viruses, nematodes, and the like. Specific pathogens for the major crops include: Soybeans: Phytophthora megasperma fsp. glycinea, Macrophomina phaseolina, Rhizoctonia solani, Sclerotinia sclerotiorum, Fusarium oxysporum, Diaporthe phaseolorum var. sojae (Phomopsis sojae), Diaporthe phaseolorum var. caulivora, Sclerotium rolfsii, Cercospora kikuchii, Cercospora sojina, Peronospora manshurica, Colletotrichum dematium (Colletotrichum truncatum), Corynespora cassiicola, Septoria glycines, Phyllosticta sojicola, Alternaria alternata, Pseudomonas syringae p.v. glycinea, Xanthomonas campestris p.v. phaseoli, Microsphaera diffusa, Fusarium semitectum, Phialophora gregata, Soybean mosaic virus, Glomerella glycines, Tobacco Ring spot virus, Tobacco Streak virus, Phakopsora pachyrhizi, Pythium aphanidermatum, Pythium ultimum, Pythium debaryanum, Tomato spotted wilt virus, Heterodera glycines Fusarium solani; Canola: Albugo candida, Alternaria brassicae, Leptosphaeria maculans, Rhizoctonia solani, Sclerotinia sclerotiorum, Mycosphaerella brassicicola, Pythium ultimum, Peronospora parasitica, Fusarium roseum, Alternaria alternata; Alfalfa: Clavibacter michiganensis subsp. insidiosum, Pythium ultimum, Pythium irregulare, Pythium splendens, Pythium debaryanum, Pythium aphanidermatum, Phytophthora megasperma, Peronospora trifoliorum, Phoma medicaginis var. medicaginis, Cercospora medicaginis, Pseudopeziza medicaginis, Leptotrochila medicaginis, Fusarium oxysporum, Verticillium albo-atrum, Xanthomonas campestris p.v. alfalfae, Aphanomyces euteiches, Stemphylium herbarum, Stemphylium alfalfae, Colletotrichum trifolii, Leptosphaerulina briosiana, Uromyces striatus, Sclerotinia trifoliorum, Stagonospora meliloti, Stemphylium botryosum, Leptotrichia medicaginis; Wheat: Pseudomonas syringae p.v. atrofaciens, Urocystis agropyri, Xanthomonas campestris p.v. translucens, Pseudomonas syringae p.v. syringae, Alternaria alternata, Cladosporium herbarum, Fusarium graminearum, Fusarium avenaceum, Fusarium culmorum, Ustilago tritici, Ascochyta tritici, Cephalosporium gramineum, Collotetrichum graminicola, Erysiphe graminis f.sp. tritici, Puccinia graminis f.sp. tritici, Puccinia graminis f.sp. hordei, Puccinia graminis f.sp. avenae, Puccinia graminis f.sp. secalis, Puccinia recondita f.sp. tritici, Puccinia striiformis, Pyrenophora tritici-repentis, Septoria nodorum, Septoria tritici, Septoria avenae, Pseudocercosporella herpotrichoides, Rhizoctonia solani, Rhizoctonia cerealis, Gaeumannomyces graminis var. tritici, Pythium aphanidermatum, Pythium arrhenomanes, Pythium ultimum, Bipolaris sorokiniana, Barley Yellow Dwarf Virus, Brome Mosaic Virus, Soil Borne Wheat Mosaic Virus, Wheat Streak Mosaic Virus, Wheat Spindle Streak Virus, American Wheat Striate Virus, Claviceps purpurea, Tilletia tritici, Tilletia laevis, Ustilago tritici, Tilletia indica, Rhizoctonia solani, Pythium arrhenomannes, Pythium gramicola, Pythium aphanidermatum, High Plains Virus, European wheat striate virus; Sunflower: Plasmopara halstedii, Sclerotinia sclerotiorum, Aster Yellows, Septoria helianthi, Phomopsis helianthi, Alternaria helianthi, Alternaria zinniae, Botrytis cinerea, Phoma macdonaldii, Macrophomina phaseolina, Erysiphe cichoracearum, Rhizopus oryzae, Rhizopus arrhizus, Rhizopus stolonifer, Puccinia helianthi, Verticillium dahliae, Erwinia carotovorum pv. carotovora, Cephalosporium acremonium, Phytophthora cryptogea, Albugo tragopogonis; Corn: Colletotrichum graminicola, Fusarium moniliforme var. subglutinans, Erwinia stewartii, Gibberella zeae (Fusarium graminearum), Fusarium verticilloides, Stenocarpella maydis (Diplodia maydis), Pythium irregulare, Pythium debaryanum, Pythium graminicola, Pythium splendens, Pythium ultimum, Pythium aphanidermatum, Aspergillus flavus, Bipolaris maydis O, T (Cochliobolus heterostrophus), Helminthosporium carbonum I, II & III (Cochliobolus carbonum), Exserohilum turcicum I, II & III, Helminthosporium pedicellatum, Physoderma maydis, Phyllosticta maydis, Kabatiella maydis, Cercospora sorghi, Ustilago maydis, Puccinia sorghi, Puccinia polysora, Macrophomina phaseolina, Penicillium oxalicum, Nigrospora oryzae, Cladosporium herbarum, Curvularia lunata, Curvularia inaequalis, Curvularia pallescens, Clavibacter michiganense subsp. nebraskense, Trichoderma viride, Maize Dwarf Mosaic Virus A & B, Wheat Streak Mosaic Virus, Maize Chlorotic Dwarf Virus, Claviceps sorghi, Pseudonomas avenae, Erwinia chrysanthemi pv. zea, Erwinia carotovora, Corn stunt spiroplasma, Diplodia macrospora, Sclerophthora macrospora, Peronosclerospora sorghi, Peronosclerospora philippinensis, Peronosclerospora maydis, Peronosclerospora sacchari, Sphacelotheca reiliana, Physopella zeae, Cephalosporium maydis, Cephalosporium acremonium, Maize Chlorotic Mottle Virus, High Plains Virus, Maize Mosaic Virus, Maize Rayado Fino Virus, Maize Streak Virus, Maize Stripe Virus, Maize Rough Dwarf Virus; Sorghum: Exserohilum turcicum, C. sublineolum, Cercospora sorghi, Gloeocercospora sorghi, Ascochyta sorghina, Pseudomonas syringae p.v. syringae, Xanthomonas campestris p.v. holcicola, Pseudomonas andropogonis, Puccinia purpurea, Macrophomina phaseolina, Perconia circinata, Fusarium moniliforme, Alternaria alternata, Bipolaris sorghicola, Helminthosporium sorghicola, Curvularia lunata, Phoma insidiosa, Pseudomonas avenae (Pseudomonas alboprecipitans), Ramulispora sorghi, Ramulispora sorghicola, Phyllachara sacchari, Sporisorium reilianum (Sphacelotheca reiliana), Sphacelotheca cruenta, Sporisorium sorghi, Sugarcane mosaic H, Maize Dwarf Mosaic Virus A & B, Claviceps sorghi, Rhizoctonia solani, Acremonium strictum, Sclerophthona macrospora, Peronosclerospora sorghi, Peronosclerospora philippinensis, Sclerospora graminicola, Fusarium graminearum, Fusarium verticillioides, Fusarium oxysporum, Pythium arrhenomanes, Pythium graminicola, etc.; Tomato: Corynebacterium michiganense pv. michiganense, Pseudomonas syringae pv. tomato, Ralstonia solanacearum, Xanthomonas vesicatoria, Xanthomonas perforans, Alternaria solani, Alternaria porri, Collectotrichum spp., Fulvia fulva Syn. Cladosporium fulvum, Fusarium oxysporum f. lycopersici, Leveillula taurica/Oidiopsis taurica, Phytophthora infestans, other Phytophthora spp., Pseudocercospora fuligena Syn. Cercospora fuligena, Sclerotium rolfsii, Septoria lycopersici, Meloidogyne spp.; Potato: Ralstonia solanacearum, Pseudomonas solanacearum, Erwinia carotovora subsp. Atroseptica Erwinia carotovora subsp. Carotovora, Pectobacterium carotovorum subsp. Atrosepticum, Pseudomonas fluorescens, Clavibacter michiganensis subsp. Sepedonicus, Corynebacterium sepedonicum, Streptomyces scabiei, Colletotrichum coccodes, Alternaria alternate, Mycovellosiella concors, Cercospora solani, Macrophomina phaseolina, Sclerotium bataticola, Choanephora cucurbitarum, Puccinia pittieriana, Aecidium cantensis, Alternaria solani, Fusarium spp., Phoma solanicola f. foveata, Botrytis cinerea, Botryotinia fuckeliana, Phytophthora infestans, Pythium spp., Phoma andigena var. andina, Pleospora herbarum, Stemphylium herbarum, Erysiphe cichoracearum, Spongospora subterranean Rhizoctonia solani, Thanatephorus cucumeris, Rosellinia sp. Dematophora sp., Septoria lycopersici, Helminthosporium solani, Polyscytalum pustulans, Sclerotium rolfsii, Athelia rolfsii, Angiosorus solani, Ulocladium atrum, Verticillium albo-atrum, V. dahlia, Synchytrium endobioticum, Sclerotinia sclerotiorum, candidatus Liberibacter solanacearum; Banana: Fusarium oxysporum f. sp. cubense, Colletotrichum musae, Armillaria mellea, Armillaria tabescens, Pseudomonas solanacearum, Phyllachora musicola, Mycosphaerella fijiensis, Rosellinia bunodes, Pseudonomas spp., Pestalotiopsis leprogena, Cercospora hayi, Pseudomonas solanacearum, Ceratocystis paradoxa, Verticillium theobromae, Trachysphaera fructigena, Cladosporium musae, Junghuhnia vincta, Cordana johnstonii, Cordana musae, Fusarium pallidoroseum, Colletotrichum musae, Verticillium theobromae, Fusarium spp., Acremonium spp., Cylindrocladium spp., Deightoniella torulosa, Nattrassia mangiferae, Dreschslera gigantean, Guignardia musae, Botryosphaeria ribis, Fusarium solani, Nectria haematococca, Fusarium oxysporum, Rhizoctonia spp., Colletotrichum musae, Uredo musae, Uromyces musae, Acrodontium simplex, Curvularia eragrostidis, Drechslera musae-sapientum, Leptosphaeria musarum, Pestalotiopsis disseminate, Ceratocystis paradoxa, Haplobasidion musae, Marasmiellus inoderma, Pseudomonas solanacearum, Radopholus similis, Lasiodiplodia theobromae, Fusarium pallidoroseum, Verticillium theobromae, Pestalotiopsis palmarum, Phaeoseptoria musae, Pyricularia grisea, Fusarium moniliforme, Gibberella fujikuroi, Erwinia carotovora, Erwinia chrysanthemi, Cylindrocarpon musae, Meloidogyne arenaria, Meloidogyne incognita, Meloidogyne javanica, Pratylenchus coffeae, Pratylenchus goodeyi, Pratylenchus brachyurus, Pratylenchus reniformia, Sclerotinia sclerotiorum, Nectria foliicola, Mycosphaerella musicola, Pseudocercospora musae, Limacinula tenuis, Mycosphaerella musae, Helicotylenchus multicinctus, Helicotylenchus dihystera, Nigrospora sphaerica, Trachysphaera frutigena, Ramichloridium musae, Verticillium theobromae, Phytophthora infestans, Phytophthora parasitica, Phytophthora ramorum, Phytophthora ipomoeae, Phytophthora mirabilis, Phytophthora capsici, Phytophthora porri, Phytophthora sojae, Phytophthora palmivora, and Phytophthora phaseoli.

[0323] Bacterial pathogens include, but are not limited to, Agrobacterium tumefaciens, candidatus Liberibacter asiaticus, candidatus Liberibacter solanacearum, Clavibacter michiganensis, Clavibacter sepedonicus, Dickeya dadantii, Dickeya solani, Erwinia amylovora, Pectobacterium atrosepticum, Pectobacterium carotovorum, Pseudomonas andropogonis, Pseudomonas avenae, Pseudomonas alboprecipitans, Pseudomonas fluorescens, Pseudomonas savastanoi, Pseudomonas solanacearum, Pseudomonas syringae, Ralstonia solanacearum, Xanthomonas axonopodis, Xanthomonas campestris, Xanthomonas citri, Xanthomonas perforans, Xanthomonas vesicatoria, Xanthomonas oryzae, and Xylella fastidiosa.

[0324] Oomycete pathogens include, but are not limited to, Phytophthora infestans, Phytophthora ipomoeae, Phytophthora mirabilis, Phytophthora phaseoli, Phytophthora megasperma fsp. glycinea, Phytophthora megasperma, Phytophthora cryptogea, Peronospora spp. and Pythium spp.

[0325] Nematode pathogens include, but are not limited to, Anguina tritici, Aphelenchoides besseyi, Bursaphelenchus xylophilus, Ditylenchus dipsaci, Globodera spp., Globodera pallida, Globodera rostochiensis, Heterodera spp., Heterodera avenae, Heterodera filipjevi, Heterodera glycines, Meloidogyne spp., Meloidogyne graminicola, Meloidogyne hapla, Meloidogyne incógnita, Meloidogyne enterolobii, Merlinius spp., Nacobbus aberrans, Paratylenchus spp., Pratylenchus coffeae, Pratylenchus neglectus, Pratylenchus penetrans, Pratylenchus penetrans, Pratylenchus thornei, Pratylenchus vulnus, Pratylenchus zeae, Radopholus similis, Rotylenchulus reniformis, Tylenchorhynchus spp., and Xiphinema index.

[0326] Insect pests include, but are not limited to, insects selected from the orders Coleoptera, Diptera, Hymenoptera, Lepidoptera, Mallophaga, Homoptera, Hemiptera, Orthoptera, Dermaptera, Isoptera, Anoplura, Siphonaptera, Thysanoptera, Trichoptera, etc., particularly Coleoptera and Lepidoptera.

[0327] Insects of the order Lepidoptera include, but are not limited to, armyworms, cutworms, loopers, and heliothines in the family Noctuidae Agrotis ipsilon Hufnagel (black cutworm); A. orthogonia Morrison (western cutworm); A. segetum Denis & Schiffermüller (turnip moth); A. subterranea Fabricius (granulate cutworm); Alabama argillacea Hübner (cotton leaf worm); Anticarsia gemmatalis Hübner (velvetbean caterpillar); Athetis mindara Barnes and McDunnough (rough skinned cutworm); Earias insulana Boisduval (spiny bollworm); E. vittella Fabricius (spotted bollworm); Egira (Xylomyges) curialis Grote (citrus cutworm); Euxoa messoria Harris (darksided cutworm); Helicoverpa armigera Hübner (American bollworm); H. zea Boddie (corn earworm or cotton bollworm); Heliothis virescens Fabricius (tobacco budworm); Hypena scabra Fabricius (green cloverworm); Hyponeuma taltula Schaus; (Mamestra configurata Walker (bertha armyworm); M. brassicae Linnaeus (cabbage moth); Melanchra picta Harris (zebra caterpillar); Mocis latipes Guenée (small mocis moth); Pseudaletia unipuncta Haworth (armyworm); Pseudoplusia includens Walker (soybean looper); Richia albicosta Smith (Western bean cutworm); Spodoptera frugiperda JE Smith (fall armyworm); S. exigua Hübner (beet armyworm); S. litura Fabricius (tobacco cutworm, cluster caterpillar); Trichoplusia ni Hübner (cabbage looper); borers, casebearers, webworms, coneworms, and skeletonizers from the families Pyralidae and Crambidae such as Achroia grisella Fabricius (lesser wax moth); Amyelois transitella Walker (naval orangeworm); Anagasta kuehniella Zeller (Mediterranean flour moth); Cadra cautella Walker (almond moth); Chilo partellus Swinhoe (spotted stalk borer); C. suppressalis Walker (striped stem/rice borer); C. terrenellus Pagenstecher (sugarcane stemp borer); Corcyra cephalonica Stainton (rice moth); Crambus caliginosellus Clemens (corn root webworm); C. teterrellus Zincken (bluegrass webworm); Cnaphalocrocis medinalis Guenée (rice leaf roller); Desmia funeralis Hübner (grape leaffolder); Diaphania hyalinata Linnaeus (melon worm); D. nitidalis Stoll (pickleworm); Diatraea flavipennella Box; D. grandiosella Dyar (southwestern corn borer), D. saccharalis Fabricius (surgarcane borer); Elasmopalpus lignosellus Zeller (lesser cornstalk borer); Papaipema nebris (stalk borer); Eoreuma loftini Dyar (Mexican rice borer); Ephestia elutella Hübner (tobacco (cacao) moth); Galleria mellonella Linnaeus (greater wax moth); Hedylepta accepta Butler (sugarcane leafroller); Herpetogramma licarsisalis Walker (sod webworm); Homoeosoma electellum Hulst (sunflower moth); Loxostege sticticalis Linnaeus (beet webworm); Maruca testulalis Geyer (bean pod borer); Orthaga thyrisalis Walker (tea tree web moth); Ostrinia nubilalis Hübner (European corn borer); Ostrinia furnacalis (Asian corn borer); Plodia interpunctella Hübner (Indian meal moth); Scirpophaga incertulas Walker (yellow stem borer); Udea rubigalis Guenée (celery leaftier); and leafrollers, budworms, seed worms, and fruit worms in the family Tortricidae Acleris gloverana Walsingham (Western blackheaded budworm); A. variana Fernald (Eastern blackheaded budworm); Hellula phidilealis (cabbage budworm moth); Adoxophyes orana Fischer von Rösslerstamm (summer fruit tortrix moth); Archips spp. including A. argyrospila Walker (fruit tree leaf roller) and A. rosana Linnaeus (European leaf roller); Argyrotaenia spp.; Bonagota salubricola Meyrick (Brazilian apple leafroller); Choristoneura spp.; Cochylis hospes Walsingham (banded sunflower moth); Cydia latiferreana Walsingham (filbertworm); C. pomonella Linnaeus (codling moth); Endopiza viteana Clemens (grape berry moth); Eupoecilia ambiguella Hübner (vine moth); Grapholita molesta Busck (oriental fruit moth); Lobesia botrana Denis & Schiffermüller (European grape vine moth); Platynota flavedana Clemens (variegated leafroller); P. stultana Walsingham (omnivorous leafroller); Spilonota ocellana Denis & Schiffermüller (eyespotted bud moth); and Suleima helianthana Riley (sunflower bud moth).

[0328] Selected other agronomic pests in the order Lepidoptera include, but are not limited to, Alsophila pometaria Harris (fall cankerworm); Anarsia lineatella Zeller (peach twig borer); Anisota senatoria J. E. Smith (orange striped oakworm); Antheraea pernyi Guérin-Méneville (Chinese Oak Silkmoth); Bombyx mori Linnaeus (Silkworm); Bucculatrix thurberiella Busck (cotton leaf perforator); Colias eurytheme Boisduval (alfalfa caterpillar); Datana integerrima Grote & Robinson (walnut caterpillar); Dendrolimus sibiricus Tschetwerikov (Siberian silk moth), Ennomos subsignaria Hübner (elm spanworm); Erannis tiliaria Harris (linden looper); Erechthias flavistriata Walsingham (sugarcane bud moth); Euproctis chrysorrhoea Linnaeus (browntail moth); Harrisina americana Guérin-Méneville (grapeleaf skeletonizer); Heliothis subflexa Guenée; Hemileuca oliviae Cockrell (range caterpillar); Hyphantria cunea Drury (fall webworm); Keiferia lycopersicella Walsingham (tomato pinworm); Lambdina fiscellaria fiscellaria Hulst (Eastern hemlock looper); L. fiscellaria lugubrosa Hulst (Western hemlock looper); Leucoma salicis Linnaeus (satin moth); Lymantria dispar Linnaeus (gypsy moth); Malacosoma spp.; Manduca quinquemaculata Haworth (five spotted hawk moth, tomato hornworm); M. sexta Haworth (tomato hornworm, tobacco hornworm); Operophtera brumata Linnaeus (winter moth); Orgyia spp.; Paleacrita vernata Peck (spring cankerworm); Papilio cresphontes Cramer (giant swallowtail, orange dog); Phryganidia californica Packard (California oakworm); Phyllocnistis citrella Stainton (citrus leafminer); Phyllonorycter blancardella Fabricius (spotted tentiform leafminer); Pieris brassicae Linnaeus (large white butterfly); P. rapae Linnaeus (small white butterfly); P. napi Linnaeus (green veined white butterfly); Platyptilia carduidactyla Riley (artichoke plume moth); Plutella xylostella Linnaeus (diamondback moth); Pectinophora gossypiella Saunders (pink bollworm); Pontia protodice Boisduval & Leconte (Southern cabbageworm); Sabulodes aegrotata Guenée (omnivorous looper); Schizura concinna J. E. Smith (red humped caterpillar); Sitotroga cerealella Olivier (Angoumois grain moth); Telchin licus Drury (giant sugarcane borer); Thaumetopoea pityocampa Schiffermüller (pine processionary caterpillar); Tineola bisselliella Hummel (webbing clothesmoth); Tuta absoluta Meyrick (tomato leafminer) and Yponomeuta padella Linnaeus (ermine moth).

[0329] Of interest are larvae and adults of the order Coleoptera including weevils from the families Anthribidae, Chrysomelidae, and Curculionidae including, but not limited to: Bruchus pisorum (pea weevil), Callosobruchus maculatus (cowpea weevil), Anthonomus grandis Boheman (boll weevil); Cylindrocopturus adspersus LeConte (sunflower stem weevil); Diaprepes abbreviatus Linnaeus (Diaprepes root weevil); Hypera punctata Fabricius (clover leaf weevil); Lissorhoptrus oryzophilus Kuschel (rice water weevil); Metamasius hemipterus hemipterus Linnaeus (West Indian cane weevil); M. hemipterus sericeus Olivier (silky cane weevil); Sitophilus zeamais (maize weevil); Sitophilus granarius Linnaeus (granary weevil); S. oryzae Linnaeus (rice weevil); Smicronyx fulvus LeConte (red sunflower seed weevil); S. sordidus LeConte (gray sunflower seed weevil); Sphenophorus maidis Chittenden (maize billbug); S. livis Vaurie (sugarcane weevil); Rhabdoscelus obscurus Boisduval (New Guinea sugarcane weevil); flea beetles, cucumber beetles, rootworms, leaf beetles, potato beetles, and leafminers in the family Chrysomelidae including, but not limited to: Cerotoma trifurcata (bean leaf beetle), Chaetocnema ectypa Horn (desert corn flea beetle); C. pulicaria Melsheimer (corn flea beetle); Colaspis brunnea Fabricius (grape colaspis); Diabrotica barberi Smith & Lawrence (northern corn rootworm); D. undecimpunctata howardi Barber (southern corn rootworm); D. virgifera virgifera LeConte (western corn rootworm); Leptinotarsa decemlineata Say (Colorado potato beetle); Oulema melanopus Linnaeus (cereal leaf beetle); Phyllotreta cruciferae Goeze (corn flea beetle); Zygogramma exclamationis Fabricius (sunflower beetle); beetles from the family Coccinellidae including, but not limited to: Epilachna varivestis Mulsant (Mexican bean beetle); chafers and other beetles from the family Scarabaeidae including, but not limited to: Antitrogus parvulus Britton (Childers cane grub); Cyclocephala borealis Arrow (northern masked chafer, white grub); C. immaculata Olivier (southern masked chafer, white grub); Dermolepida albohirtum Waterhouse (Greyback cane beetle); Euetheola humilis rugiceps LeConte (sugarcane beetle); Lepidiota frenchi Blackburn (French's cane grub); Tomarus gibbosus De Geer (carrot beetle); T. subtropicus Blatchley (sugarcane grub); Phyllophaga crinita Burmeister (white grub); P. latifrons LeConte (June beetle); Popillia japonica Newman (Japanese beetle); Rhizotrogus majalis Razoumowsky (European chafer); carpet beetles from the family Dermestidae; wireworms from the family Elateridae, eleodes spp., Melanotus spp. including M. communis Gyllenhal (wireworm); Conoderus spp.; Limonius spp.; Agriotes spp.; Ctenicera spp.; Aeolus spp.; bark beetles from the family Scolytidae; beetles from the family Tenebrionidae; beetles from the family Cerambycidae such as, but not limited to, Migdolus fryanus Westwood (longhorn beetle); and beetles from the Buprestidae family including, but not limited to, Aphanisticus cochinchinae seminulum Obenberger (leaf-mining buprestid beetle).

[0330] Adults and immatures of the order Diptera are of interest, including leafminers Agromyza parvicornis Loew (corn blotch leafminer); midges including, but not limited to: Contarinia sorghicola Coquillett (sorghum midge); Mayetiola destructor Say (Hessian fly); Neolasioptera murtfeldtiana Felt, (sunflower seed midge); Sitodiplosis mosellana Géhin (wheat midge); fruit flies (Tephritidae), Bactrocera oleae (olive fruit fly), Ceratitis capitata (Mediterranean fruit fly), Oscinella frit Linnaeus (frit flies); maggots including, but not limited to: Delia spp. including Delia platura Meigen (seedcorn maggot); D. coarctata Fallen (wheat bulb fly); Fannia canicularis Linnaeus, F. femoralis Stein (lesser house flies); Meromyza americana Fitch (wheat stem maggot); Musca domestica Linnaeus (house flies); Stomoxys calcitrans Linnaeus (stable flies)); face flies, horn flies, blow flies, Chrysomya spp.; Phormia spp.; and other muscoid fly pests, horse flies Tabanus spp.; bot flies Gastrophilus spp.; Oestrus spp.; cattle grubs Hypoderma spp.; deer flies Chrysops spp.; Melophagus ovinus Linnaeus (keds); and other Brachycera, mosquitoes Aedes spp.; Anopheles spp.; Culex spp.; black flies Prosimulium spp.; Simulium spp.; biting midges, sand flies, sciarids, and other Nematocera.

[0331] Agronomically important members from the order Hemiptera include, but are not limited to: Acrosternum hilare Say (green stink bug); Acyrthisiphon pisum Harris (pea aphid); Adelges spp. (adelgids); Adelphocoris rapidus Say (rapid plant bug); Anasa tristis De Geer (squash bug); Aphis craccivora Koch (cowpea aphid); A. fabae Scopoli (black bean aphid); A. gossypii Glover (cotton aphid, melon aphid); A. maidiradicis Forbes (corn root aphid); A. pomi De Geer (apple aphid); A. spiraecola Patch (spirea aphid); Aulacaspis tegalensis Zehntner (sugarcane scale); Aulacorthum solani Kaltenbach (foxglove aphid); Bemisia argentifolii (silverleaf whitefly); Bemisia tabaci Gennadius (tobacco whitefly, sweetpotato whitefly); B. argentifolii Bellows & Perring (silverleaf whitefly); Blissus leucopterus leucopterus Say (chinch bug); Blostomatidae spp.; Brevicoryne brassicae Linnaeus (cabbage aphid); Cacopsylla pyricola Foerster (pear psylla); Calocoris norvegicus Gmelin (potato capsid bug); Chaetosiphon fragaefolii Cockerell (strawberry aphid); Cimicidae spp.; Coreidae spp.; Corythuca gossypii Fabricius (cotton lace bug); Cyrtopeltis modesta Distant (tomato bug); C. notatus Distant (suckfly); Deois flavopicta Stål (spittlebug); Dialeurodes citri Ashmead (citrus whitefly); Diaphnocoris chlorionis Say (honeylocust plant bug); Diuraphis noxia Kurdjumov/Mordvilko (Russian wheat aphid); Duplachionaspis divergens Green (armored scale); Dysaphis plantaginea Paaserini (rosy apple aphid); Dysdercus suturellus Herrich-Schäffer (cotton stainer); Dysmicoccus boninsis Kuwana (gray sugarcane mealybug); Empoasca fabae Harris (potato leafhopper); Eriosoma lanigerum Hausmann (woolly apple aphid); Erythroneoura spp. (grape leafhoppers); Eumetopina flavipes Muir (Island sugarcane planthopper); Eurygaster spp.; Euschistus servus Say (brown stink bug); E. variolarius Palisot de Beauvois (one-spotted stink bug); Graptostethus spp. (complex of seed bugs); and Hyalopterus pruni Geoffroy (mealy plum aphid); Icerya purchasi Maskell (cottony cushion scale); Labopidicola allii Knight (onion plant bug); Laodelphax striatellus Fallen (smaller brown planthopper); Leptoglossus corculus Say (leaf-footed pine seed bug); Leptodictya tabida Herrich-Schaeffer (sugarcane lace bug); Lipaphis erysimi Kaltenbach (turnip aphid); Lygocoris pabulinus Linnaeus (common green capsid); Lygus lineolaris Palisot de Beauvois (tarnished plant bug); L. hesperus Knight (Western tarnished plant bug); L. pratensis Linnaeus (common meadow bug); L. rugulipennis Poppius (European tarnished plant bug); Macrosiphum euphorbiae Thomas (potato aphid); Macrosteles quadrilineatus Forbes (aster leafhopper); Magicicada septendecim Linnaeus (periodical cicada); Mahanarva fimbriolata Stål (sugarcane spittlebug); M. posticata Stål (little cicada of sugarcane); Melanaphis sacchari Zehntner (sugarcane aphid); Melanaspis glomerata Green (black scale); Metopolophium dirhodum Walker (rose grain aphid); Myzus persicae Sulzer (peach-potato aphid, green peach aphid); Nasonovia ribisnigri Mosley (lettuce aphid); Nephotettix cinticeps Uhler (green leafhopper); N. nigropictus Stål (rice leafhopper); Nezara viridula Linnaeus (southern green stink bug); Nilaparvata lugens Stål (brown planthopper); Nysius ericae Schilling (false chinch bug); Nysius raphanus Howard (false chinch bug); Oebalus pugnax Fabricius (rice stink bug); Oncopeltus fasciatus Dallas (large milkweed bug); Orthops campestris Linnaeus; Pemphigus spp. (root aphids and gall aphids); Peregrinus maidis Ashmead (corn planthopper); Perkinsiella saccharicida Kirkaldy (sugarcane delphacid); Phylloxera devastatrix Pergande (pecan phylloxera); Planococcus citri Risso (citrus mealybug); Plesiocoris rugicollis Fallen (apple capsid); Poecilocapsus lineatus Fabricius (four-lined plant bug); Pseudatomoscelis seriatus Reuter (cotton fleahopper); Pseudococcus spp. (other mealybug complex); Pulvinaria elongata Newstead (cottony grass scale); Pyrilla perpusilla Walker (sugarcane leafhopper); Pyrrhocoridae spp.; Quadraspidiotus perniciosus Comstock (San Jose scale); Reduviidae spp.; Rhopalosiphum maidis Fitch (corn leaf aphid); R. padi Linnaeus (bird cherry-oat aphid); Saccharicoccus sacchari Cockerell (pink sugarcane mealybug); Scaptacoris castanea Perty (brown root stink bug); Schizaphis graminum Rondani (greenbug); Sipha flava Forbes (yellow sugarcane aphid); Sitobion avenae Fabricius (English grain aphid); Sogatella furcifera Horvath (white-backed planthopper); Sogatodes oryzicola Muir (rice delphacid); Spanagonicus albofasciatus Reuter (whitemarked fleahopper); Therioaphis maculata Buckton (spotted alfalfa aphid); Tinidae spp.; Toxoptera aurantii Boyer de Fonscolombe (black citrus aphid); and T. citricida Kirkaldy (brown citrus aphid); Trialeurodes vaporariorum (greenhouse whitefly); Trialeurodes abutiloneus (bandedwinged whitefly) and T. vaporariorum Westwood (greenhouse whitefly); Trioza diospyri Ashmead (persimmon psylla); Typhlocyba pomaria McAtee (white apple leafhopper); Homalodisca vitripennis (glassy winged sharpshooter); Cicadulina mbila (maize leafhopper); Circulifer tenellus (beet leafhopper); Daktulosphaira vitifoliae (grape phylloxera); Coccus pseudomagnoliarum (citricola scale); Coccus hesperidum (soft brown scale); Pulvinaria regalis (horse chestnut scale); Pulvinaria psidii (green shield scale); Aonidiella aurantii (California citrus scale); Aonidiella taxus (Asiatic red scale); Aspidiotus excisus (Cyanotis scale); Aspidiotus nerii (oleander scale); Aulacaspis rosarum (Asiatic rose scale); Aulacaspis tubercularis (white mango scale); Chionaspis lepineyi (oak scurfy scale); Hemiberlesia lataniae (latania scale); Kuwanaspis pseudoleucaspis (bamboo diaspidid scale; Lepidosaphes pini (pine oystershell scale); Lopholeucaspis japonica (Japanese maple scale); Oceanaspidiotus spinosus (spined scale insect); Parlatoria ziziphi (black parlatoria scale); Pseudaonidia duplex (camphor scale); Unaspis yanonensis (arrowhead scale); Phenacoccus solani (Solanum mealybug); Planococcus citri (citrus mealybug); Planococcus (ficus vine mealybug); Pseudococcus longispinus (long-tailed mealybug); Pseudococcus affinis (glasshouse mealybug); Diaphorina citri (Asian citrus psyllid); and Bactericera cockerelli (potato psyllid).

[0332] Insects of the order Thysanoptera include, but are not limited to, Thrips tabaci (potato thrips) and Frankliniella occidentalis (western flower thrips).

[0333] Other insects of interest include, but are not limited to, grasshopper species (e.g. Schistocerca americana and crickets (e.g. Teleogryllus taiwanemma, Teleogryllus emma).

[0334] Acarids are arachnids (Class Arachnida) that are members of the subclass Arci which comprise mites and ticks. While acarids are not true insects, acarids are often grouped together with insect pests of plants because both acarids and insects are members of the phylum Arthropoda. As used herein, the term “insects” encompasses both true insects and acarids unless stated otherwise or apparent from the context of usage. Acarids of interest include, but are not limited to: Aceria tosichella Keifer (wheat curl mite); Panonychus ulmi Koch (European red mite); Petrobia latens Müller (brown wheat mite); Steneotarsonemus bancrofti Michael (sugarcane stalk mite) spider mites and red mites in the family Tetranychidae, Oligonychus grypus Baker & Pritchard, O. indicus Hirst (sugarcane leaf mite), O. pratensis Banks (Banks grass mite), O. stickneyi McGregor (sugarcane spider mite); Tetranychus urticae Koch (two spotted spider mite); T. mcdanieli McGregor (McDaniel mite); T. cinnabarinus Boisduval (carmine spider mite); T. turkestani Ugarov & Nikolski (strawberry spider mite), flat mites in the family Tenuipalpidae, Brevipalpus lewisi McGregor (citrus flat mite); rust and bud mites in the family Eriophyidae.

[0335] Additional embodiments of the methods and compositions of the present invention are described elsewhere herein.

[0336] The following examples are offered by way of illustration and not by way of limitation.

### EXAMPLES

### Example 1: Preparation of a Library of Candidate NLR Genes

[0337] Based on the observations of the present inventors that all characterized NLR resistance genes to foliar pathogens in both monocots and dicots are expressed in unchallenged leaf tissue, the present inventors endeavored to prepare a library of candidate NLR resistance genes from unchallenged leaf tissues from a collection of grass species for the purpose of identifying R genes against plant pathogens of interest. Published examples of such NLR genes that are expressed in unchallenged leaf tissues include, for example, CcRpp1, Pm3b, Rpg1, Rpg5 and Sr33 (Bruggeman et al. (2002) PNAS 99(14) 9328-9333, doi: 10.1073/pnas. 142284999; Bruggeman et al. (2008) PNAS 105(39):14970-5, doi: 10.1073/pnas.0807270105; Kawashima et al., 2016, Nature Biotechnol. 2016 34(6):661-665; U.S. Pat. No. 10,842,097; Yahiaoui et al. (2004) Plant J. 37:528-538, doi: 10.1046/j.1365-313X.2003.01977.x). Unpublished examples of such NLR genes include candidate NLR genes for rps2, Rps6, Rps8, Yrr1, Yrr2, and Yrr3. Interestingly, the present inventors discovered that the average number of NLRs expressed in a leaf transcriptome is relatively low (approx. 125), and the NLR genes identified so far that encode efficacious NLRs are expressed in unchallenged leaf tissue. Furthermore, the top 25% of NLRs expressed in leaf tissue appears to be highly enriched for efficacious NLRs. We have combined this key insight with the ability to rapidly transform genes into wheat and have generated a stably transformed library constructed from over 1,000 diverse grass NLRs in wheat.

[0338] Previous work has established molecular and evolutionary signatures of NLRs that contribute to plant immunity such as gene family and rapid evolution (Yang et al., 2013, PNAS 110:18572-18577). Such features Previous work has established molecular and evolutionary signatures of NLRs that contribute to plant immunity such as gene family and rapid evolution (Yang et al., 2013, PNAS 110:18572-18577). Such features of interest include, but are not limited to:
[0339] the presence of intraspecific variation in the amino acid sequence encoded by an NLR;
[0340] the absence of intraspecific variation in the amino acid sequence encoded by an NLR;
[0341] the presence of interspecific variation in the amino acid sequence encoded by an NLR;
[0342] the absence of interspecific variation in the amino acid sequence encoded by an NLR; and
[0343] substantial intraspecific allelic variation in the amino acid sequence encoded by an NLR.

[0344] As used in the Examples herein, a “construct” is specific NLR that has been cloned either into an entry vector or a destination vector: a T1 family is seed derived from a single T0 plant, and a T2 family is a seed derived from a single T1 plant.

### Materials and Methods

### Plants Materials and Growth Conditions

[0345] Seeds of the following grass species were used for the preparation of libraries of candidate NLR genes: Achnatherum hymenoides, Aegilops bicornis, Aegilops longissima, Aegilops searsii, Aegilops sharonensis, Agropyron cristatum, Avena abyssinica, Brachypodium distachyon, Briza media, Cynosurus cristatus, Echinaria capitata, Holcus lanatus, Hordeum vulgare, Koeleria macrantha, Lolium perenne, Melica ciliata, Phalaris coerulescens, and Poa trivialis.

[0346] Seeds were germinated on damp filter paper on petri dishes and placed at 4° C. for 6-7 days to break seed dormancy. Germinated seeds were transferred into a 1:1 mixture of peat & sand: cereal mix. Seedlings were grown in a clean controlled environment chamber under 16 hrs light at 20° C./8 hrs dark at 16° C. dark. The controlled environment chamber used is a clean germination room free of pests and disease. First and second leaves were harvested per plant per species dependent on leaf size and used for RNA isolation at 12 to 35 days post germination dependent on species.

### RNA Isolation

[0347] Total RNA was extracted from leaves using a Trizol-phenol based protocol according to manufacturer's protocol (Sigma-Aldrich; T9424).

### RNAseq

[0348] Barcoded Illumina TruSeq RNA HT libraries were constructed and pooled with four samples per lane on a single HiSeq 2500 lane run in Rapid Run mode. Sequencing was performed using 150 bp paired-end reads. Paired end reads were assessed for quality using FastQC and trimmed before assembly using Trimmomatic (v0.36) with parameters set at ILLUMINACLIP: 2:30:10, LEADING: 5, TRAILING: 5, SLIDINGWINDOW: 4:15, and MINLEN: 36. These parameters were used to remove all reads with adapter sequence, ambiguous bases, or a substantial reduction in read quality. De novo transcriptome assemblies were generated using Trinity with default parameters (version 2013 Nov. 10). Kallisto (v0.43.1) was used to estimate expression levels for all transcripts using default parameters and 100 bootstraps.

### Identification of Highly Expressed NLRs

[0349] TransDecoder (v4.1.0) LongOrfs was used to predict all open reading frames in de novo assembled transcriptomes. InterProScan (v5.27-66.0) was used to annotate domains using Coils and the Pfam, Superfamily, and ProSite databases. Any protein that contained both a nucleotide binding domain and a leucine-rich repeat domain was advanced in the analysis. A custom script developed from FAT-CAT was used to classify nucleotide binding domains based on a phylogenetic tree developed from rice, Brachypodium distachyon, and barley nucleotide binding domains derived from NLRs. NLR encoding genes were advanced based on the following requirements: the transcript must contain either a complete or 5′ partial open reading frame; the gene must be among the top 25% expressed NLRs; and the gene does not belong to NLR families known to require an additional NLR (Bailey et al. (2018) Genome Biol. 19:23, doi.org/10.1186/s13059-018-1392-6).

[0350] Among the candidate NLRs, redundancy was removed using CD-HIT (v4.7) requiring 100% identity (-c 1.0). PCR primers were developed using Gateway adapters attB1 (SEQ ID NO: 27) and attB2 (SEQ ID NO: 28) fused to first 20 nucleotides of the start or end of the coding sequence, respectively.

### Example 2: Testing of Candidate NLR Genes in Transgenic Plants

### NLR Identification and Molecular Cloning

[0351] Sequencing, de novo RNAseq assembly, NLR identification, and PCR primer development was completed for plant 81 accessions from 18 grass species. Of the 81 accessions sequenced, 69 resistant accessions were progressed to molecular cloning including species in the genera Achnatherum, Aegilops, Agropyron, Avena, Brachypodium, Briza, Cynosurus, Echinaria, Holcus, Hordeum, Koeleria, Lolium, Melica, Phalaris, and Poa.

[0352] The proportion of cloned NLRs is variable according to species, guided by the available diversity of accessions in each species and the prevalence of resistance to target pathogens. PCR primers were developed for a total of 1,909 NLRs. In total, 1,019 NLRs have been cloned into Gateway pDONR entry vector. This set includes the control genes Mla3 (wheat blast), Mla7 (wheat stripe rust), Mla8 (wheat stripe rust), and Rps6 (wheat stripe rust). Additional controls have been identified and synthesised: Sr33 (wheat stem rust), Sr50 (wheat stem rust), Sr35 (wheat stem rust), Pm3 (wheat powdery mildew), Lr21 (wheat leaf rust), and Yr10 (wheat stripe rust).

[0353] The NLRs in the entry clones were transferred to a destination vector pDEST2BL, which is a binary vector, by LR reaction of the Gateway® system. The resultant transformation vectors were introduced into Agrobacterium tumefaciens strain EHA105 by electroporation. The Agrobacterium strains carrying the transformation vectors were used to transform a wheat variety Fielder according to the published method (Ishida et al. (2015) Methods Mol. Biol. 1223: 189-198) with a modification that an immature embryo was cut into three pieces when transferred to the second selection medium.

### Pathogen Assays

[0354] The library of candidate NLR genes was tested against multiple pathogens of wheat, including wheat stem rust (Puccinia graminis f. sp. tritici), wheat stripe rust (Puccinia striiformis f. sp. tritici), wheat leaf rust (Puccinia triticina), wheat blast (Magnaporthe oryzae Triticum) and wheat powdery mildew (Blumeria graminis f. sp. tritici). The experimental design for seedling pathogen assays involved inoculating three seeds from at least four different Tl family per NLR. Families displaying resistant phenotypes were saved for seed and re-phenotyping at the T2 stage, eight seed were grown and phenotyped at the T2 stage.

[0355] Status definitions of screened NLRs are as follows: confirmed NLRs have consistent resistant or intermediate phenotypic scores for T2 families or individuals, derived from a resistant T1 family. Candidate NLRs have borderline intermediate phenotypic scores displayed in T2 families and/or insufficient data to make a conclusion. NLRs for rescreening have susceptible phenotypes shown across T2 families, including from previously resistant or intermediate T1 families. These T2 families may represent NLRs conferring intermediate resistance or NLRs which have insufficient expression under the current promoter.

Wheat Stem Rust (Puccinia graminis f. sp. tritici)

[0356] Rust inoculations were made according to the standard protocols used at the USDA-ARS Cereal Disease Laboratory and the University of Minnesota (Huang et al. (2018) Plant Dis. 102(6): 1124-1135, doi: 10.1094/PDIS-06-17-0880-RE). On the day before inoculation, urediniospores of the rust pathogens were removed from the −80° C. freezer, heat-shocked in a 45° C. water bath for 15 min, and then rehydrated in an 80% relative humidity chamber overnight. After assessing the germination rate (Scott et al. 2014), 10 mg of urediniospores were placed into individual gelatin capsules (size 00) to which 700 ml of the oil carrier was added. The inoculum suspension was applied to 12-day-old plants (second leaf fully expanded) using custom atomizers (Tallgrass Solutions, Inc., Manhattan, KS) pressured by a pump set at 25 to 30 kPa. Approximately 0.15 mg of urediniospores were applied per plant. Immediately after inoculation, the plants were placed in front of a small electric fan for 3 to 5 min to hasten evaporation of the oil carrier from leaf surfaces. Plants were allowed to off-gas for an additional 90 min before placing them inside mist chambers. Inside the mist chambers, ultrasonic humidifiers (Vick's model V5100NSJUV; Proctor & Gamble Co., Cincinnati, OH) were run continuously for 30 min to provide sufficient initial moisture on the plants for the germination of urediniospores. For the next 16 to 20 h, plants were kept in the dark and the humidifiers run for 2 min every 15 min to maintain moisture on the plants. For experiments with the stem rust pathogen, light (400 W high pressure sodium lamps emitting 300 mmol photon s-1m-2) was provided for 2 to 4 h after the dark period. Then, the chamber doors were opened halfway to allow the leaf surfaces to dry completely before returning the plants to the greenhouse under the same conditions described above (Huang et al. (2018) Plant Dis. 102(6):1124-1135, doi: 10.1094/PDIS-06-17-0880-RE).

[0357] All rust phenotyping experiments were conducted in a completely randomized design and repeated at least once over time. Accessions exhibiting variable reactions across experiments were repeated in an additional experiment, if sufficient seeds were available. Stem rust ITs on the accessions were scored 12 days after inoculation using a 0 to 4 scale (Roelfs and Martens (1998) Phytopathol. 78:526-533; Stakman et al. (1962) “Identification of Physiological Races of Puccinia graminis var. tritici,” U.S. Department of Agricultural Publications E617. USDA, Washington, D C, 1962).

[0358] The NLR Dk_04_40 displayed a clear resistant response in the T1, with all individuals from two different T1 families displaying a 0 or; on the Stakman scale.

TABLE 1
Summary of confirmed NLRs following screening of T1 material with stem rust.

| Construct | Species | Accession | Domain Structure | TPM¹ | Status |
|---|---|---|---|---|---|
| Dk_04_40 | Aegilops longissima | 8735 | CC-NB-LRR | 1.0 | Confirmed |

¹Transcripts per million.

Wheat Stripe Rust (Puccinia striiformis f. sp. tritici)

[0359] Wheat plants are grown at 18/11 C with a 16 hour day length. For inoculation, wheat plants are inoculated at the first leaf stage with a spore and talc mix 1:16 ratio using a rotary inoculator. Plants are phenotyped 10 days post inoculation using the McNeal phenotypic scale (Roelfs et al., 1992). Resistant individuals were classified by a McNeal score 4 or lower. Intermediate individuals by a McNeal score of 5 to 7 or include either reduced sporulation on the leaf that was clearly differentiable to susceptible controls or sectors of resistance on a leaf (mesothetic response). For ease of phenotyping, some rounds of T2 screening were phenotyped with an overall score of resistant (R), intermediate (I), or susceptible (S) to denote the above McNeal scores.

[0360] Confirmed NLRs are derived from 6 accessions from 3 species, with native expression ranging from 0.66 to 5.24 transcripts per million (tpm). Confirmed NLRs are: Dk_01_03, Dk_01_04, Dk_01_06, Dk_01_31, Dk_01_33, Dk_01_34, Dk_01_92, Dk_02_27, Dk_02_28, Dk_02_49, Dk_03_76.

TABLE 2
Screening of T2 families derived from resistant T1 material with wheat stripe
rust (Puccinia striiformis f. sp. tritici) isolate 16/035.

| | | Primary Screen (T1) | | Secondary Screen (T2) | | | |
|---|---|---|---|---|---|---|---|
| NLR | T1 family | 14 dpi | 18 dpi | Score | Mix | Max | Status |
| Dk_01_03 | Dk_01_03_05 | S | 8 | I | I | S | Confirmed |
| Dk_01_03 | Dk_01_03_05 | R | 8 | S | S | S | Confirmed |
| Dk_01_03 | Dk_01_03_05 | R | 7 | S | S | S | Confirmed |
| Dk_01_03 | Dk_01_03_05 | R | 8 | I | I | S | Confirmed |
| Dk_01_03 | Dk_01_03_06 | R | 6 | I | I | S | Confirmed |
| Dk_01_03 | Dk_01_03_06 | R | 7 | I | I | S | Confirmed |
| Dk_01_03 | Dk_01_03_06 | R | 6 | I | 3 | 8 | Confirmed |
| Dk_01_04 | Dk_01_04_02 | Seg | 8 | I | I | I | Confirmed |
| Dk_01_04 | Dk_01_04_02 | Seg | 4 | S | S | S | Confirmed |
| Dk_01_04 | Dk_01_04_02 | Seg | 5 | R | 2 | 6 | Confirmed |
| Dk_01_06 | Dk_01_06_03 | 2Int; 1R | 8 | R | 2 | 7 | Confirmed |
| Dk_01_06 | Dk_01_06_03 | 2Int; 1R | 5 | R | 0 | 6 | Confirmed |
| Dk_01_06 | Dk_01_06_05 | 2Int; 1S | 8 | S | 8 | 9 | Confirmed |
| Dk_01_06 | Dk_01_06_05 | 2Int; 1S | 6 | S | S | S | Confirmed |
| Dk_01_31 | Dk_01_31_04 | 2Int; 1R | 8 | R | 1 | 9 | Confirmed |
| Dk_01_31 | Dk_01_31_04 | 2Int; 1R | 7 | S | S | S | Confirmed |
| Dk_01_33 | Dk_01_33_06 | R | 8 | S | S | S | Confirmed |
| Dk_01_33 | Dk_01_33_06 | R | 8 | S | S | S | Confirmed |
| Dk_01_33 | Dk_01_33_06 | R | 8 | R | 1 | 6 | Confirmed |
| Dk_01_33 | Dk_01_33_06 | R | 6 | R | 0.5 | 6 | Confirmed |
| Dk_01_34 | Dk_01_34_03 | 2Int; 1R | 8 | S | 5 | 6 | Confirmed |
| Dk_01_34 | Dk_01_34_03 | 2Int; 1R | 5 | I | 4 | 6 | Confirmed |
| Dk_01_92 | Dk_01_92_02 | 1R; 1Int; 1S | 8 | R | 0.5 | 4 | Confirmed |
| Dk_01_92 | Dk_01_92_02 | 1R; 1Int; 1S | 3 | R | 0.5 | 4 | Confirmed |
| Dk_02_27 | Dk_02_27_01 | 2Int; 1R | 8 | I | I | S | Confirmed |
| Dk_02_27 | Dk_02_27_01 | 2Int; 1R | 7 | R | R | S | Confirmed |
| Dk_02_27 | Dk_02_27_01 | 2R; 1Int | 8 | R | R | S | Confirmed |
| Dk_02_27 | Dk_02_27_01 | 2R; 1Int | 6 | I | I | S | Confirmed |
| Dk_02_27 | Dk_02_27_01 | 2R; 1Int | 5 | I | 4 | 7 | Confirmed |
| Dk_02_28 | Dk_02_28_05 | 2S; 1R | 8 | I | 4 | 7 | Confirmed |
| Dk_02_28 | Dk_02_28_05 | 2S; 1R | 4 | R | 3 | 6 | Confirmed |
| Dk_02_49 | Dk_02_49_04 | Int | 6 | S | S | S | Confirmed |
| Dk_02_49 | Dk_02_49_04 | Int | 8 | S | S | S | Confirmed |
| Dk_02_49 | Dk_02_49_04 | R | 5 | R | 1 | 8 | Confirmed |
| Dk_02_49 | Dk_02_49_04 | R | 4 | R | 1 | 6 | Confirmed |
| Dk_02_49 | Dk_02_49_04 | R | 4 | R | 1 | 7 | Confirmed |
| Dk_02_49 | Dk_02_49_04 | Int | 7 | I | I | S | Confirmed |
| Dk_02_49 | Dk_02_49_04 | Int | 6 | I | I | S | Confirmed |
| Dk_03_76 | Dk_03_76_06 | 2S; 1R | 8 | S | S | S | Confirmed |
| Dk_03_76 | Dk_03_76_06 | 2S; 1R | (3) | R | 2 | 4 | Confirmed |

TABLE 3
Summary of confirmed NLRs following screening at the T2 with wheat stripe rust.

| Construct | Species | Accession | Domain Structure | tpm | Status |
|---|---|---|---|---|---|
| Dk_01_03 | Aegilops sharonensis | 546 | NB-LRR | 3.28 | Confirmed |
| Dk_01_04 | Aegilops sharonensis | 546 | NB-LRR | 2.21 | Confirmed |
| Dk_01_06 | Aegilops sharonensis | 546 | CC-NB-LRR-CC | 3.03 | Confirmed |
| Dk_01_31 | Aegilops sharonensis | 575 | NB-LRR | 1.59 | Confirmed |
| Dk_01_33 | Aegilops sharonensis | 575 | NB-LRR | 2.16 | Confirmed |
| Dk_01_34 | Aegilops sharonensis | 6793 | NB-LRR-CC-LRR | 5.24 | Confirmed |
| Dk_01_92 | Holcus lanatus | PI462334 | NB-LRR | 3.99 | Confirmed |
| Dk_02_27 | Koeleria macrantha | PI440454 | CC-NB-LRR | 4.56 | Confirmed |
| Dk_02_28 | Koeleria macrantha | PI440454 | NB-LRR | 0.66 | Confirmed |
| Dk_02_49 | Koeleria macrantha | W617985 | NB-LRR | 0.79 | Confirmed |
| Dk_03_76 | Koeleria macrantha | W617985 | NB-LRR | 0.85 | Confirmed |

Wheat Leaf Rust (Puccinia triticina)

[0361] Wheat plants are grown at 18/11 C with a 16-hour day length. For inoculation, wheat plants are inoculated at the first leaf stage with a spore and talc mix 1:16 ratio using a rotary inoculator. All isolates were stored as urediniospores at either −80° C. in liquid nitrogen or in vacuum tubes at 4° C. Plants were screened with wheat leaf rust (Puccinia triticina) isolate 13/34 and scored on a standard phenotypic scale used for leaf rust where 0 and; indicate an immune or nearly immune phenotype with no uredinia present. Phenotypic scores of 1 to 2 denote resistance; X, Y, and Z denote varying heterogenous responses; and 3 to 4 denote susceptible responses (Roelfs, 1984, “Race specificity and methods of study,” A P. Roelfs and W. R. Bushnell, eds. The Cereal Rusts Vol. I; Origins, Specificity, Structure, and Physiology. Academic Press, Orlando, pp. 131-164.

[0362] The NLR Dk_01_19 exhibited a clear resistance response in the T1, indicating that the transgene was functional against wheat leaf rust. All individuals from 4 Tl families displayed a resistance response of controlled cell death with wrinkled tips, showing small uredinia surrounded by necrosis.

TABLE 4
Summary of confirmed NLRs following screening at the T1 with leaf rust.

| | | | Domain | | |
|---|---|---|---|---|---|
| Construct | Species | Accession | Structure | TPM | Status |
| Dk_01_19 | Aegilops sharonensis | 546 | CC-NB-LRR | 15.6474 | Confirmed |

### Example 3: Identification of Known NLR Genes that Confer Resistance to Oomycetes, Necrotrophic Plant Pathogens, Nematodes, Insects, and Viruses in Subpopulations of Highly Expressed NLRs from Dicots

[0363] The subgroup of highly expressed NLRs is saturated for functional R genes within the group of NLRs that are expressed in the seedling transcriptome of dicots (FIGS. 12-14). To expand the observations in Arabidopsis thaliana accession Columbia-0 (Col-0), alleles of known resistance genes RPP1, RPP5, RPP7, and RPP8 against late blight (Hyaloperonospora arabidopsidis) and WRR4, WRR8, and WRR9 white rust (Albugo candida) are also present in the top 25% of NLRs expressed in seedlings of further accessions Landsberg erecta (Ler-0), San Feliu (Sf-2), and Wassilewskija (Ws-0). The most highly expressed NLRs in accessions Sf-2 and Ws-0 are alleles of RLM3 which confers resistance to the necrotrophic pathogens grey mould (Botrytis cinerea), dark leaf spot of cabbage (Alternaria brassicicola) and dark spot of crucifers (Alternaria brassicae). To further determine that characterised NLRs identified via association genomics and long-read sequencing could be identified using the above criteria from wild relatives of cultivated plant species, we investigated Rpi-amr1e from Solanum americanum (Witek et al., 2021, Nature Plants 2021 7:198-208). Indeed, Rpi-amr1e was determined to be in the top 25% of highly expressed NLRs (FIG. 15). To confirm high expression of functional NLRs across tissue types, we investigated Mi-1.2 from Solanum lycopersicum which confers resistance to root-knot nematodes (Meloidogyne spp.), the potato aphid (Macrosiphum euphorbiae), and the sweet potato whitefly (Bemisia tabaci). Mi-1.2 is present in the top 10% of highly expressed NLRs in the leaf (FIG. 16 and FIG. 18) and in the top 12% of highly expressed NLRs in the root (FIG. 17 and FIG. 19). Furthermore, the Tm-2 resistance gene to tobamoviruses including Tomato Mosaic Virus and Tobacco Mosaic Virus is present in the top 17% of expressed NLRs in the leaf and in the top 10% of expressed NLRs in the root tissue of the S. lycopersicum cultivar VENT Cherry (FIG. 18 and FIG. 19). These results demonstrate that the methods of the present invention for preparing a library of candidate resistance (R) genes can be employed to produce libraries of candidate R genes that are highly enriched for efficacious R genes, particularly NLRs, against a wide variety of plant pests such as, for example, fungi, bacteria, oomycetes, nematodes, viruses, insects and mites and such libraries can be prepared from not only leaves but also other plant organs or plant parts including, for example, roots.

### Example 4: Testing of Candidate NLR Genes in Transgenic Plants

[0364] Wheat Stem Rust (Puccinia graminis f. sp. tritici)

[0365] Rust inoculations were made according to the standard protocols used at the USDA-ARS Cereal Disease Laboratory and the University of Minnesota (Huang et al. (2018) Plant Dis. 102(6): 1124-1135, doi: 10.1094/PDIS-06-17-0880-RE). On the day before inoculation, urediniospores of the rust pathogens were removed from the −80° C. freezer, heat-shocked in a 45° C. water bath for 15 min, and then rehydrated in an 80% relative humidity chamber overnight. After assessing the germination rate (Scott et al. 2014), 10 mg of urediniospores were placed into individual gelatin capsules (size 00) to which 700 ml of the oil carrier was added. The inoculum suspension was applied to 12-day-old plants (second leaf fully expanded) using custom atomizers (Tallgrass Solutions, Inc., Manhattan, KS) pressured by a pump set at 25 to 30 kPa. Approximately 0.15 mg of urediniospores were applied per plant. Immediately after inoculation, the plants were placed in front of a small electric fan for 3 to 5 min to hasten evaporation of the oil carrier from leaf surfaces. Plants were allowed to off-gas for an additional 90 min before placing them inside mist chambers. Inside the mist chambers, ultrasonic humidifiers (Vick's model V5100NSJUV; Proctor & Gamble Co., Cincinnati, OH) were run continuously for 30 min to provide sufficient initial moisture on the plants for the germination of urediniospores. For the next 16 to 20 h, plants were kept in the dark and the humidifiers run for 2 min every 15 min to maintain moisture on the plants. For experiments with the stem rust pathogen, light (400 W high pressure sodium lamps emitting 300 mmol photon s-1m-2) was provided for 2 to 4 h after the dark period. Then, the chamber doors were opened halfway to allow the leaf surfaces to dry completely before returning the plants to the greenhouse under the same conditions described above (Huang et al. (2018) Plant Dis. 102(6):1124-1135, doi: 10.1094/PDIS-06-17-0880-RE).

[0366] All rust phenotyping experiments were conducted in a completely randomized design. Accessions exhibiting variable reactions across experiments were repeated in an additional experiment, if sufficient seeds were available. Stem rust ITs on the accessions were scored 12 days after inoculation using a 0 to 4 scale (Roelfs and Martens (1998) Phytopathol. 78:526-533; Stakman et al. (1962) “Identification of Physiological Races of Puccinia graminis var. tritici,” U.S. Department of Agricultural Publications E617. USDA, Washington, D C, 1962). ITs are summarised as phenotypes designated as resistant (R), susceptible (S), or segregating (seg) where resistance is segregating within the T1 family. Phenotypes of segregating families indicated as the phenotypes of individual plants. Plants were phenotyped with race QTHJC and resistant constructs further phenotyped with race TTKSK. T1 families not inoculated with TTKSK indicated with ‘-’.

[0367] Confirmed NLRs are derived from 14 accessions from 8 species. Confirmed NLRs are: Dk_01_21, Dk_01_48, Dk_03_15, Dk_03_49, Dk_03_68, Dk_04_40, Dk_04_67, Dk_04_71, Dk_04_91, Dk_05_75, Dk_05_92, Dk_06_02, Dk_06_03, Dk_06_10, Dk_06_36, Dk_06_52, Dk_08_16, Dk_08_79, Dk_09_55.

TABLE 5
Screening of T1 families with Wheat stem rust (Puccinia
graminis f. sp. tritici) isolate QTHJC and TTKSK.

| | | Pgt race QTHJC | | Pgt race TTKSK | | T1 Family |
|---|---|---|---|---|---|---|
| Construct | T1 Family | IT | Score | IT | Score | Status |
| Dk_01_21 | Dk_01_21_01 | 2 plants = 2/ | Seg | 3 | S | Segregating |
| | | 2 plants = 3 | | | | |
| Dk_01_21 | Dk_01_21_02 | 1 plants = 2/ | Seg | 1pl = 1, | Seg | Segregating |
| | | 2 plants = 3 | | 1pl = 3 | | |
| Dk_01_48 | Dk_01_48_02 | 0; | R | 0; 1− | S | Confirmed |
| Dk_01_48 | Dk_01_48_02 | 0; 12 | R | 0; 1− | S | Confirmed |
| Dk_01_48 | Dk_01_48_03 | 2 plants = 2/ | Seg | — | — | Segregating |
| | | 1 plant = 3 | | | | |
| Dk_01_48 | Dk_01_48_04 | 2 plants = 2/ | Seg | — | — | Segregating |
| | | 1 plant = 3 | | | | |
| Dk_01_48 | Dk_01_48_06 | 0; 11− | R | 1pl = 3, | Seg | Confirmed |
| | | | | 1pl = 11+ | | |
| Dk_03_15 | Dk_03_15_05 | 2 | R | 3 | S | Confirmed |
| Dk_03_49 | Dk_03_49_04 | 2 | R | 3 | S | Confirmed |
| Dk_03_68 | Dk_03_68_03 | 2 plants = 12/ | Seg | 3 | S | Segregating |
| | | 2 plants = 3 | | | | |
| Dk_04_40 | Dk_04_40_02 | 00; | R | 00; | R | Confirmed |
| Dk_04_40 | Dk_04_40_03 | 00; | R | 00; | R | Confirmed |
| Dk_04_40 | Dk_04_40_03 | 00; | R | 11− | R | Confirmed |
| Dk_04_40 | Dk_04_40_04 | 3 | S | 1 | R | Confirmed |
| Dk_04_67 | Dk_04_67_01 | 2 | R | 11+ | R | Confirmed |
| Dk_04_67 | Dk_04_67_02 | 2 | R | 11+ | R | Confirmed |
| Dk_04_67 | Dk_04_67_02 | 2 | R | 22− | R | Confirmed |
| Dk_04_71 | Dk_04_71_03 | 2 plants = 3/ | Seg | 3 | S | Segregating |
| | | 2 plants = 2 | | | | |
| Dk_04_91 | Dk_04_91_04 | 2 | R | 32 | S | Confirmed |
| Dk_05_75 | Dk_05_75_01 | 0 | R | — | — | Confirmed |
| Dk_05_92 | Dk_05_92_01 | 0 | R | — | — | Confirmed |
| Dk_06_02 | Dk_06_02_05 | 2 | R | 3 | S | Confirmed |
| Dk_06_03 | Dk_06_03_02 | 22+ | R | 3 | S | Confirmed |
| Dk_06_10 | Dk_06_10_04 | 2 | R | 0; 11− | R | Confirmed |
| Dk_06_10 | Dk_06_10_06 | 22+ | R | 3 | S | Confirmed |
| Dk_06_36 | Dk_06_36_03 | 11+ | R | 11− | R | Confirmed |
| Dk_06_52 | Dk_06_52_01 | 11+ | R | 2 | R | Confirmed |
| Dk_06_52 | Dk_06_52_01 | 11+ | R | — | — | Confirmed |
| Dk_06_52 | Dk_06_52_01 | 1 plants = 3/ | Seg | 3 | S | Segregating |
| | | 2 plants = 11+ | | | | |
| Dk_06_52 | Dk_06_52_04 | 1 | R | 11+ | R | Confirmed |
| Dk_06_52 | Dk_06_52_04 | 11+ | R | 11− | R | Confirmed |
| Dk_06_52 | Dk_06_52_04 | 1 | R | 32 | S | Confirmed |
| Dk_06_52 | Dk_06_52_05 | 1 | R | 0; 11− | R | Confirmed |
| Dk_06_52 | Dk_06_52_06 | 1 | R | 3 | S | Confirmed |
| Dk_06_52 | Dk_06_52_06 | 3 plants = 3/ | Seg | 3 | S | Segregating |
| | | 1 plants = 11+ | | | | |
| Dk_08_16 | Dk_08_16_02 | 2 plants = 3/ | Seg | — | — | Segregating |
| | | 1 plant = 0 | | | | |
| Dk_08_79 | Dk_08_79_01 | 1 plant = 3/ | Seg | — | — | Segregating |
| | | 2 plants = 0; 21 | | | | |
| Dk_08_79 | Dk_08_79_01 | 0; 12 | R | — | — | Confirmed |
| Dk_08_79 | Dk_08_79_01 | 1 plant = 32, | Seg | — | — | Segregating |
| | | 2 plants = 0; 21 | | | | |
| Dk_09_55 | Dk_09_55_01 | 11+ | R | — | — | Confirmed |
| Dk_09_55 | Dk_09_55_01 | 11+ | R | — | — | Confirmed |

TABLE 6
Summary of confirmed NLRs following screening at the T1 with stem rust.

| | | | Domain | | |
|---|---|---|---|---|---|
| Construct | Species | Accession | Structure | TPM | Status |
| Dk_01_21 | Aegilops | 575 | NB-LRR | 4.92885 | Confirmed |
| | sharonensis | | | | |
| Dk_01_48 | Aegilops | 546 | CC-NB-LRR | 1.99831 | Confirmed |
| | sharonensis | | | | |
| Dk_03_15 | Cynosurus cristatus | PI251810 | NB-LRR | 3.56616 | Confirmed |
| Dk_03_49 | Holcus lanatus | PI659841 | NB-LRR | 1.99917 | Confirmed |
| Dk_03_68 | Aegilops | 575 | NB-LRR | 2.41543 | Confirmed |
| | sharonensis | | | | |
| Dk_04_40 | Aegilops longissima | 8735 | CC-NB-LRR | 1 | Confirmed |
| Dk_04_67 | Aegilops bicornis | 2327 | CC-NB-LRR | 1.3 | Confirmed |
| Dk_04_71 | Aegilops bicornis | 2327 | CC-NB-LRR | 38.1 | Confirmed |
| Dk_04_91 | Aegilops bicornis | 6065 | CC-NB-LRR | 1.6 | Confirmed |
| Dk_05_75 | Aegilops bicornis | 6065 | NB-LRR | 1.8 | Confirmed |
| Dk_05_92 | Aegilops bicornis | 6150 | NB-LRR | 1 | Confirmed |
| Dk_06_02 | Aegilops longissima | 1059 | CC-NB-LRR | 1.8 | Confirmed |
| Dk_06_03 | Aegilops longissima | 1059 | NB-LRR | 3.7 | Confirmed |
| Dk_06_10 | Aegilops bicornis | 6150 | NB-LRR | 1 | Confirmed |
| Dk_06_36 | Aegilops searsii | 6223 | CC-NB-LRR | 1.95888 | Confirmed |
| Dk_06_52 | Aegilops searsii | 6229 | CC-NB-LRR | 1.27708 | Confirmed |
| Dk_08_16 | Aegilops | 2020 | CC-NB-LRR | 27.1316 | Confirmed |
| | sharonensis | | | | |
| Dk_08_79 | Avena abyssinica | PI158202 | CC-NB-LRR- | 5.19358 | Confirmed |
| | | | CC-LRR | | |
| Dk_09_55 | Briza media | PI3212443 | NB-LRR | 2.77708 | Confirmed |

Wheat Stripe Rust (Puccinia striiformis f. sp. tritici)

[0368] Wheat plants are grown at 18/11 C with a 16 hour day length. For inoculation, wheat plants are inoculated at the first leaf stage with a spore and talc mix 1:16 ratio using a rotary inoculator. Plants are phenotyped 10 days post inoculation using the McNeal phenotypic scale (Roelfs et al., 1992). Resistant individuals were classified by a McNeal score 4 or lower. Intermediate individuals by a McNeal score of 5 to 7 or include either reduced sporulation on the leaf that was clearly differentiable to susceptible controls or sectors of resistance on a leaf (mesothetic response). For ease of phenotyping, some rounds of T2 screening were phenotyped with an overall score of resistant (R), intermediate (I), or susceptible (S) to denote the above McNeal scores. Each entry denotes an individual plant derived from a T1 family that was scored as a T2 family in the next generation. Some T1 families were scored as pooled phenotypes for the T1 family, indicated as segregating phenotypes. Where individual McNeal scores for each plant were not saved, this is indicated with ‘-’.

[0369] Confirmed NLRs are derived from 18 accessions from 9 species. Confirmed NLRs are: Dk_01_35, Dk_01_55, Dk_01_57, Dk_01_59, Dk_01_60, Dk_01_61, Dk_01_62, Dk_01_64, Dk_01_68, Dk_02_02, Dk_02_03, Dk_02_06, Dk_02_07, Dk_02_08, Dk_02_11, Dk_02_13, Dk_02_14, Dk_02_19, Dk_02_20, Dk_02_25, Dk_02_34, Dk_02_35, Dk_02_36, Dk_02_38, Dk_02_39, Dk_02_42, Dk_02_44, Dk_02_46, Dk_03_13, Dk_03_16, Dk_03_19, Dk_03_48, Dk_03_58, Dk_03_60, Dk_04_34, Dk_04_44, Dk_04_85, Dk_04_88, Dk_04_92, Dk_04_95, Dk_04_96, Dk_05_11, Dk_05_14, Dk_05_15, Dk_05_16, Dk_05_24, Dk_05_29, Dk_05_30, Dk_05_33, Dk_05_34, Dk_05_35, Dk_05_38, Dk_05_42, Dk_05_44, Dk_05_47, Dk_05_53, Dk_05_56, Dk_06_01, Dk_06_03, Dk_06_04, Dk_06_05, Dk_06_06, Dk_06_52, Dk_06_53.

TABLE 7
Screening of T2 families derived from resistant T1 material with wheat stripe
rust (Puccinia striiformis f. sp. tritici) isolate 16/035.

| | | Primary Screen (T1) | | | | |
|---|---|---|---|---|---|---|
| | | | McNeal | Secondary Screen (T2) | | |
| Construct | T1 Family | Score | Score | Score | Min | Max |
| Dk_01_35 | Dk_01_35_02 | 2Int; 1R | — | I | 6 | 9 |
| Dk_01_35 | Dk_01_35_02 | 2Int; 1R | — | I | 6 | 9 |
| Dk_01_55 | Dk_01_55_04 | S | — | I | 6 | 9 |
| Dk_01_55 | Dk_01_55_04 | 2R; 1Int | — | S | 7 | 9 |
| Dk_01_55 | Dk_01_55_04 | 2S; 1Int | — | I | 5 | 9 |
| Dk_01_57 | Dk_01_57_02 | 1R; 1Int; 1S | — | I | 5 | 9 |
| Dk_01_57 | Dk_01_57_02 | 1R; 1Int; 1S | — | I | 5 | 9 |
| Dk_01_57 | Dk_01_57_02 | 2R; 1S | — | R | 4 | 9 |
| Dk_01_57 | Dk_01_57_02 | 2R; 1S | — | I | 5 | 9 |
| Dk_01_59 | Dk_01_59_01 | R | — | I | 5 | 9 |
| Dk_01_59 | Dk_01_59_01 | R | — | I | 5 | 9 |
| Dk_01_59 | Dk_01_59_01 | Int | — | I | 5 | 9 |
| Dk_01_59 | Dk_01_59_07 | 2S; 1R | — | S | 8 | 9 |
| Dk_01_59 | Dk_01_59_07 | 2S; 1R | — | I | 6 | 9 |
| Dk_01_59 | Dk_01_59_07 | 2S; 1R | — | I | 6 | 9 |
| Dk_01_60 | Dk_01_60_01 | R | 1 | S | 7 | 8 |
| Dk_01_60 | Dk_01_60_01 | R | 3 | S | 7 | 9 |
| Dk_01_60 | Dk_01_60_01 | R | 4 | R | 4 | 9 |
| Dk_01_60 | Dk_01_60_01 | R | 2 | S | 7 | 9 |
| Dk_01_60 | Dk_01_60_01 | R | 3 | I | 6 | 9 |
| Dk_01_60 | Dk_01_60_02 | 2S; 1R | — | S | 8 | 9 |
| Dk_01_60 | Dk_01_60_02 | 2S; 1R | — | I | 6 | 9 |
| Dk_01_60 | Dk_01_60_02 | 2S; 1R | — | R | 3 | 9 |
| Dk_01_60 | Dk_01_60_02 | 2S; 1R | — | S | 7 | 9 |
| Dk_01_61 | Dk_01_61_01 | R | — | R | 4 | 9 |
| Dk_01_61 | Dk_01_61_01 | R | — | S | 7 | 9 |
| Dk_01_61 | Dk_01_61_01 | R | — | S | 8 | 9 |
| Dk_01_61 | Dk_01_61_01 | 2R; 1S | — | S | 7 | 9 |
| Dk_01_61 | Dk_01_61_01 | 2R; 1S | — | I | 6 | 9 |
| Dk_01_61 | Dk_01_61_01 | 2R; 1S | — | I | 5 | 9 |
| Dk_01_61 | Dk_01_61_05 | 2R; 1Int | — | I | 6 | 9 |
| Dk_01_61 | Dk_01_61_05 | 2R; 1Int | — | I | 6 | 9 |
| Dk_01_61 | Dk_01_61_05 | 2R; 1Int | — | S | 7 | 9 |
| Dk_01_62 | Dk_01_62_01 | 1R; 1Int; 1S | — | I | 6 | 9 |
| Dk_01_62 | Dk_01_62_01 | 1R; 1Int; 1S | — | I | 6 | 9 |
| Dk_01_64 | Dk_01_64_02 | R | 2 | I | 6 | 9 |
| Dk_01_64 | Dk_01_64_02 | R | 3 | S | 7 | 9 |
| Dk_01_64 | Dk_01_64_02 | R | 3 | S | 7 | 9 |
| Dk_01_68 | Dk_01_68_04 | 2R; 1S | — | I | 6 | 9 |
| Dk_01_68 | Dk_01_68_04 | 2R; 1S | — | S | 7 | 9 |
| Dk_01_68 | Dk_01_68_04 | 2R; 1S | — | R | 4 | 9 |
| Dk_02_02 | Dk_02_02_06 | 2Int; 1S | — | S | 7 | 9 |
| Dk_02_02 | Dk_02_02_06 | 2Int; 1R | — | S | 7 | 9 |
| Dk_02_02 | Dk_02_02_06 | 2Int; 1R | — | I | 5 | 9 |
| Dk_02_03 | Dk_02_03_04 | 2Int; 1R | — | I | 6 | 9 |
| Dk_02_03 | Dk_02_03_04 | R | — | I | 6 | 9 |
| Dk_02_03 | Dk_02_03_04 | R | — | I | 6 | 9 |
| Dk_02_06 | Dk_02_06_02 | R | — | I | 6 | 9 |
| Dk_02_06 | Dk_02_06_02 | 2R; 1Int | — | I | 5 | 9 |
| Dk_02_06 | Dk_02_06_02 | 2R; 1Int | — | I | 6 | 9 |
| Dk_02_07 | Dk_02_07_05 | 2R; 1Int | — | I | 5 | 9 |
| Dk_02_07 | Dk_02_07_05 | 1R; 1Int; 1S | — | I | 5 | 9 |
| Dk_02_08 | Dk_02_08_03 | 1R; 1Int; 1S | — | S | 7 | 9 |
| Dk_02_08 | Dk_02_08_03 | 1R; 1Int; 1S | — | S | 7 | 9 |
| Dk_02_08 | Dk_02_08_06 | 1R; 1Int; 1S | — | I | 6 | 9 |
| Dk_02_08 | Dk_02_08_06 | 2S; 1R | — | S | 7 | 9 |
| Dk_02_11 | Dk_02_11_04 | S | — | I | 5 | 9 |
| Dk_02_11 | Dk_02_11_04 | 2S; 1R | — | S | 7 | 9 |
| Dk_02_13 | Dk_02_13_04 | 2S; 1R | — | R | 3 | 9 |
| Dk_02_13 | Dk_02_13_04 | 2S; 1R | — | I | 5 | 9 |
| Dk_02_13 | Dk_02_13_04 | 2S; 1R | — | I | 6 | 9 |
| Dk_02_13 | Dk_02_13_04 | 1R; 1Int; 1S | — | I | 6 | 8 |
| Dk_02_14 | Dk_02_14_03 | 1R; 1Int; 1S | — | I | 5 | 9 |
| Dk_02_14 | Dk_02_14_03 | 1R; 1Int; 1S | — | R | 4 | 9 |
| Dk_02_19 | Dk_02_19_05 | 1R; 1Int; 1S | — | I | 5 | 9 |
| Dk_02_19 | Dk_02_19_05 | 2Int; 1R | — | I | 5 | 9 |
| Dk_02_20 | Dk_02_20_05 | 2Int; 1R | — | I | 5 | 9 |
| Dk_02_20 | Dk_02_20_05 | 1R; 1Int | — | S | 7 | 9 |
| Dk_02_20 | Dk_02_20_05 | 1R; 1Int | — | I | 5 | 9 |
| Dk_02_25 | Dk_02_25_04 | R | 4 | S | 8 | 9 |
| Dk_02_25 | Dk_02_25_04 | R | 4 | I | 6 | 9 |
| Dk_02_25 | Dk_02_25_04 | I | 6 | S | 7 | 9 |
| Dk_02_34 | Dk_02_34_01 | 2S; 1R | — | I | 5 | 9 |
| Dk_02_34 | Dk_02_34_01 | 2R; 1Int | — | I | 5 | 9 |
| Dk_02_34 | Dk_02_34_01 | 2R; 1Int | — | I | 6 | 9 |
| Dk_02_34 | Dk_02_34_02 | 2R; 1Int | — | I | 6 | 9 |
| Dk_02_34 | Dk_02_34_02 | 2Int; 1R | — | I | 6 | 9 |
| Dk_02_34 | Dk_02_34_02 | 2Int; 1R | — | I | 6 | 9 |
| Dk_02_34 | Dk_02_34_02 | 2R; 1Int | — | I | 6 | 9 |
| Dk_02_35 | Dk_02_35_01 | 2R; 1Int | — | S | 8 | 9 |
| Dk_02_35 | Dk_02_35_01 | 1R; 1Int; 1S | — | S | 8 | 9 |
| Dk_02_35 | Dk_02_35_02 | 2Int; 1R | — | S | 8 | 9 |
| Dk_02_35 | Dk_02_35_02 | 2Int; 1R | — | I | 6 | 9 |
| Dk_02_35 | Dk_02_35_03 | 2S; 1Int | — | I | 6 | 9 |
| Dk_02_35 | Dk_02_35_03 | 1R; 1Int; 1S | — | I | 5 | 9 |
| Dk_02_35 | Dk_02_35_04 | 2R; 1Int | — | I | 5 | 9 |
| Dk_02_35 | Dk_02_35_04 | 2R; 1Int | — | I | 6 | 9 |
| Dk_02_36 | Dk_02_36_03 | R | 1.5 | — | — | — |
| Dk_02_36 | Dk_02_36_03 | R | 4 | — | — | — |
| Dk_02_36 | Dk_02_36_03 | I | 6 | S | 7 | 9 |
| Dk_02_38 | Dk_02_38_07 | R | 4 | I | 6 | 9 |
| Dk_02_38 | Dk_02_38_07 | R | 4 | S | 7 | 9 |
| Dk_02_38 | Dk_02_38_07 | R | 4 | S | 7 | 9 |
| Dk_02_39 | Dk_02_39_07 | 2Int; 1R | — | I | 5 | 9 |
| Dk_02_39 | Dk_02_39_07 | 2S; 1Int | — | I | 6 | 9 |
| Dk_02_42 | Dk_02_42_01 | 2R; 1S | — | R | 4 | 9 |
| Dk_02_42 | Dk_02_42_01 | 2R; 1S | — | I | 5 | 9 |
| Dk_02_42 | Dk_02_42_01 | 2R; 1S | — | I | 5 | 9 |
| Dk_02_44 | Dk_02_44_01 | R | 1 | S | 7 | 9 |
| Dk_02_44 | Dk_02_44_01 | R | 4 | S | 7 | 9 |
| Dk_02_44 | Dk_02_44_01 | I | 6 | S | 7 | 9 |
| Dk_02_44 | Dk_02_44_05 | 2R; 1S | — | I | 5 | 9 |
| Dk_02_44 | Dk_02_44_05 | 2S; 1R | — | I | 5 | 9 |
| Dk_02_46 | Dk_02_46_01 | 1R; 1Int; 1S | — | I | 6 | 9 |
| Dk_02_46 | Dk_02_46_01 | 1R; 1Int; 1S | — | S | 7 | 9 |
| Dk_02_46 | Dk_02_46_01 | 1R; 1Int; 1S | — | I | 5 | 9 |
| Dk_03_13 | Dk_03_13_07 | R | 4 | S | 7 | 9 |
| Dk_03_13 | Dk_03_13_07 | R | 4 | S | 7 | 9 |
| Dk_03_13 | Dk_03_13_07 | R | 4 | I | 6 | 9 |
| Dk_03_13 | Dk_03_13_07 | R | 4 | S | 7 | 9 |
| Dk_03_16 | Dk_03_16_02 | R | 4 | S | 7 | 8 |
| Dk_03_16 | Dk_03_16_02 | R | 4 | I | 6 | 9 |
| Dk_03_16 | Dk_03_16_02 | R | 4 | S | 7 | 9 |
| Dk_03_16 | Dk_03_16_03 | 1R; 1Int; 1S | — | I | 5 | 9 |
| Dk_03_16 | Dk_03_16_03 | 1R; 1Int; 1S | — | S | 7 | 9 |
| Dk_03_19 | Dk_03_19_01 | R | 3.5 | I | 6 | 9 |
| Dk_03_19 | Dk_03_19_01 | R | 4 | R | 4 | 8 |
| Dk_03_19 | Dk_03_19_01 | I | 6 | S | 7 | 9 |
| Dk_03_48 | Dk_03_48_03 | 2S; 1Int | — | I | 5 | 9 |
| Dk_03_48 | Dk_03_48_03 | 2Int; 1R | — | I | 5 | 9 |
| Dk_03_48 | Dk_03_48_03 | 2Int; 1R | — | I | 6 | 9 |
| Dk_03_48 | Dk_03_48_04 | 2Int; 1R | — | I | 6 | 9 |
| Dk_03_48 | Dk_03_48_04 | S | 8 | S | 7 | 9 |
| Dk_03_48 | Dk_03_48_04 | S | 8 | S | 7 | 9 |
| Dk_03_58 | Dk_03_58_07 | I | 6 | S | 7 | 9 |
| Dk_03_58 | Dk_03_58_07 | I | 6 | I | 6 | 8 |
| Dk_03_60 | Dk_03_60_03 | I | 6 | — | — | — |
| Dk_03_60 | Dk_03_60_03 | I | 6 | I | 6 | 9 |
| Dk_03_60 | Dk_03_60_03 | I | 6 | S | 7 | 9 |
| Dk_03_60 | Dk_03_60_03 | I | 6 | I | 6 | 8 |
| Dk_03_60 | Dk_03_60_03 | I | 6 | S | 7 | 9 |
| Dk_04_34 | Dk_04_34_04 | I | 5 | S | 8 | 9 |
| Dk_04_34 | Dk_04_34_04 | S | 7 | S | 7 | 9 |
| Dk_04_34 | Dk_04_34_05 | I | 6 | S | 8 | 9 |
| Dk_04_34 | Dk_04_34_05 | S | 8 | I | 6 | 8 |
| Dk_04_44 | Dk_04_44_02 | I | 6 | I | 5 | 9 |
| Dk_04_44 | Dk_04_44_02 | S | 7 | S | 7 | 9 |
| Dk_04_44 | Dk_04_44_04 | I | 5 | I | 6 | 9 |
| Dk_04_44 | Dk_04_44_04 | S | 7 | S | 8 | 9 |
| Dk_04_85 | Dk_04_85_03 | I | 5 | I | 5 | 8 |
| Dk_04_85 | Dk_04_85_03 | S | 9 | I | 6 | 9 |
| Dk_04_88 | Dk_04_88_01 | I | 6 | S | 7 | 9 |
| Dk_04_88 | Dk_04_88_01 | I | 6 | R | 4 | 9 |
| Dk_04_88 | Dk_04_88_01 | S | 8 | I | 6 | 9 |
| Dk_04_88 | Dk_04_88_01 | S | 7 | R | 0 | 9 |
| Dk_04_88 | Dk_04_88_01 | S | 8 | R | 3 | 9 |
| Dk_04_92 | Dk_04_92_02 | I | 5 | I | 6 | 9 |
| Dk_04_92 | Dk_04_92_02 | I | 6 | I | 6 | 9 |
| Dk_04_92 | Dk_04_92_02 | S | 7 | R | 4 | 9 |
| Dk_04_95 | Dk_04_95_04 | I | 5 | I | 6 | 9 |
| Dk_04_95 | Dk_04_95_04 | S | 7 | R | 3 | 8 |
| Dk_04_95 | Dk_04_95_04 | S | 7 | R | 3 | 8 |
| Dk_04_96 | Dk_04_96_04 | R | 4 | I | 5 | 8 |
| Dk_04_96 | Dk_04_96_04 | S | 7 | I | 6 | 9 |
| Dk_04_96 | Dk_04_96_04 | S | 8 | S | 7 | 9 |
| Dk_05_11 | Dk_05_11_03 | R | 3 | R | 4 | 9 |
| Dk_05_11 | Dk_05_11_03 | S | 7 | R | 4 | 9 |
| Dk_05_11 | Dk_05_11_06 | I | 5 | R | 3 | 9 |
| Dk_05_11 | Dk_05_11_06 | I | 5 | R | 4 | 7 |
| Dk_05_14 | Dk_05_14_03 | I | 5 | R | 4 | 5 |
| Dk_05_14 | Dk_05_14_03 | I | 5 | R | 3 | 5 |
| Dk_05_14 | Dk_05_14_03 | S | 8 | I | 5 | 7 |
| Dk_05_14 | Dk_05_14_06 | I | 5 | R | 4 | 9 |
| Dk_05_15 | Dk_05_15_02 | I | 6 | I | 6 | 9 |
| Dk_05_15 | Dk_05_15_02 | I | 6 | R | 4 | 9 |
| Dk_05_15 | Dk_05_15_02 | S | 8 | I | 6 | 9 |
| Dk_05_15 | Dk_05_15_06 | I | 6 | I | 5 | 9 |
| Dk_05_16 | Dk_05_16_02 | I | 5 | I | 5 | 8 |
| Dk_05_16 | Dk_05_16_02 | I | 6 | R | 3 | 9 |
| Dk_05_16 | Dk_05_16_02 | R | 3 | R | 1 | 8 |
| Dk_05_16 | Dk_05_16_02 | I | 6 | I | 6 | 8 |
| Dk_05_24 | Dk_05_24_02 | R | 4 | R | 2 | 6 |
| Dk_05_24 | Dk_05_24_02 | R | 4 | R | 4 | 8 |
| Dk_05_24 | Dk_05_24_02 | I | 5 | I | 5 | 7 |
| Dk_05_24 | Dk_05_24_04 | R | 4 | R | 0 | 7 |
| Dk_05_24 | Dk_05_24_04 | I | 5 | R | 3 | 7 |
| Dk_05_24 | Dk_05_24_04 | R | 4 | R | 3 | 7 |
| Dk_05_24 | Dk_05_24_06 | R | 4 | R | 3 | 7 |
| Dk_05_24 | Dk_05_24_06 | I | 5 | R | 0 | 7 |
| Dk_05_29 | Dk_05_29_02 | R | 3 | R | 2 | 8 |
| Dk_05_29 | Dk_05_29_02 | I | 6 | R | 4 | 8 |
| Dk_05_29 | Dk_05_29_05 | I | 5 | R | 4 | 8 |
| Dk_05_29 | Dk_05_29_05 | I | 5 | I | 6 | 8 |
| Dk_05_30 | Dk_05_30_01 | R | 4 | I | 6 | 8 |
| Dk_05_30 | Dk_05_30_01 | R | 4 | I | 5 | 8 |
| Dk_05_30 | Dk_05_30_01 | I | 6 | R | 0 | 8 |
| Dk_05_30 | Dk_05_30_04 | I | 5 | R | 0 | 8 |
| Dk_05_33 | Dk_05_33_01 | I | 5 | I | 6 | 8 |
| Dk_05_33 | Dk_05_33_01 | I | 5 | R | 4 | 8 |
| Dk_05_33 | Dk_05_33_01 | I | 6 | S | 8 | 8 |
| Dk_05_34 | Dk_05_34_04 | I | 5 | R | 2 | 9 |
| Dk_05_34 | Dk_05_34_04 | I | 6 | R | 4 | 8 |
| Dk_05_34 | Dk_05_34_04 | R | 4 | R | 3 | 8 |
| Dk_05_35 | Dk_05_35_05 | R | 4 | R | 3 | 9 |
| Dk_05_35 | Dk_05_35_05 | I | 5 | S | 8 | 9 |
| Dk_05_35 | Dk_05_35_05 | S | 7 | R | 3 | 8 |
| Dk_05_38 | Dk_05_38_04 | I | 5 | R | 4 | 8 |
| Dk_05_38 | Dk_05_38_04 | I | 6 | I | 5 | 9 |
| Dk_05_38 | Dk_05_38_06 | I | 5 | R | 0 | 8 |
| Dk_05_42 | Dk_05_42_03 | R | 4 | R | 3 | 7 |
| Dk_05_42 | Dk_05_42_03 | R | 4 | R | 4 | 7 |
| Dk_05_42 | Dk_05_42_03 | I | 6 | I | 5 | 7 |
| Dk_05_42 | Dk_05_42_06 | R | 3 | I | 6 | 7 |
| Dk_05_42 | Dk_05_42_06 | I | 6 | I | 6 | 8 |
| Dk_05_44 | Dk_05_44_01 | R | 4 | I | 5 | 7 |
| Dk_05_44 | Dk_05_44_01 | I | 5 | R | 3 | 6 |
| Dk_05_44 | Dk_05_44_01 | I | 5 | I | 5 | 7 |
| Dk_05_47 | Dk_05_47_03 | R | 4 | I | 5 | 8 |
| Dk_05_47 | Dk_05_47_03 | I | 6 | S | 7 | 7 |
| Dk_05_47 | Dk_05_47_03 | S | 8 | I | 5 | 8 |
| Dk_05_47 | Dk_05_47_03 | R | 4 | R | 3 | 7 |
| Dk_05_47 | Dk_05_47_03 | R | 4 | R | 0 | 9 |
| Dk_05_53 | Dk_05_53_07 | R | 4 | R | 2 | 9 |
| Dk_05_53 | Dk_05_53_07 | I | 5 | R | 3 | 9 |
| Dk_05_56 | Dk_05_56_03 | R | 4 | I | 6 | 8 |
| Dk_05_56 | Dk_05_56_03 | S | 7 | R | 3 | 9 |
| Dk_06_01 | Dk_06_01_02 | R | 4 | R | 1 | 8 |
| Dk_06_01 | Dk_06_01_02 | I | 6 | R | 3 | 8 |
| Dk_06_01 | Dk_06_01_02 | S | 7 | I | 5 | 9 |
| Dk_06_01 | Dk_06_01_03 | I | 6 | R | 3 | 9 |
| Dk_06_01 | Dk_06_01_03 | I | 6 | R | 3 | 8 |
| Dk_06_01 | Dk_06_01_03 | S | 7 | R | 2 | 7 |
| Dk_06_01 | Dk_06_01_05 | I | 6 | R | 1 | 7 |
| Dk_06_01 | Dk_06_01_05 | S | 7 | S | 7 | 8 |
| Dk_06_01 | Dk_06_01_05 | S | 8 | S | 7 | 8 |
| Dk_06_03 | Dk_06_03_01 | R | 4 | R | 4 | 9 |
| Dk_06_03 | Dk_06_03_01 | I | 6 | R | 4 | 8 |
| Dk_06_03 | Dk_06_03_01 | I | 6 | R | 3 | 9 |
| Dk_06_03 | Dk_06_03_02 | I | 6 | I | 6 | 8 |
| Dk_06_03 | Dk_06_03_02 | S | 7 | I | 5 | 7 |
| Dk_06_03 | Dk_06_03_02 | S | 8 | I | 6 | 7 |
| Dk_06_04 | Dk_06_04_04 | R | 4 | R | 2 | 7 |
| Dk_06_04 | Dk_06_04_04 | I | 5 | I | 6 | 7 |
| Dk_06_04 | Dk_06_04_04 | I | 6 | R | 1 | 7 |
| Dk_06_04 | Dk_06_04_05 | I | 6 | R | 3 | 8 |
| Dk_06_04 | Dk_06_04_05 | S | 8 | R | 0.5 | 8 |
| Dk_06_04 | Dk_06_04_05 | S | 8 | R | 0 | 8 |
| Dk_06_05 | Dk_06_05_02 | I | 6 | I | 5 | 8 |
| Dk_06_05 | Dk_06_05_02 | S | 7 | S | 7 | 9 |
| Dk_06_05 | Dk_06_05_03 | I | 5 | R | 4 | 9 |
| Dk_06_05 | Dk_06_05_03 | I | 6 | S | 8 | 9 |
| Dk_06_05 | Dk_06_05_03 | I | 6 | I | 6 | 8 |
| Dk_06_06 | Dk_06_06_02 | R | 4 | I | 5 | 8 |
| Dk_06_06 | Dk_06_06_02 | I | 6 | I | 5 | 8 |
| Dk_06_06 | Dk_06_06_02 | S | 7 | S | 7 | 8 |
| Dk_06_52 | Dk_06_52_01 | I | 5 | R | 4 | 9 |
| Dk_06_52 | Dk_06_52_01 | I | 6 | R | 3 | 8 |
| Dk_06_52 | Dk_06_52_01 | R | 3 | R | 4 | 7 |
| Dk_06_52 | Dk_06_52_01 | R | 4 | I | 5 | 8 |
| Dk_06_52 | Dk_06_52_01 | R | 4 | R | 3 | 8 |
| Dk_06_53 | Dk_06_53_01 | I | 5 | I | 6 | 8 |
| Dk_06_53 | Dk_06_53_02 | R | 4 | R | 3 | 7 |
| Dk_06_53 | Dk_06_53_02 | I | 6 | R | 2 | 8 |
| Dk_06_53 | Dk_06_53_03 | I | 5 | R | 4 | 8 |
| Dk_06_53 | Dk_06_53_03 | I | 5 | R | 4 | 8 |
| Dk_06_53 | Dk_06_53_03 | I | 5 | I | 5 | 9 |

TABLE 8
Summary of confirmed NLRs following screening at the T2 with wheat stripe rust.

| | | | Domain | | |
|---|---|---|---|---|---|
| Construct | Species | Accession | Structure | tpm | Status |
| Dk_01_35 | Aegilops sharonensis | 6793 | NB-LRR | 8.81425 | Confirmed |
| Dk_01_55 | Aegilops sharonensis | 6793 | NB-LRR | 8.3177 | Confirmed |
| Dk_01_57 | Aegilops sharonensis | 1998 | NB-LRR | 10.7081 | Confirmed |
| Dk_01_59 | Aegilops sharonensis | 1998 | NB-LRR-CC- | 2.4473 | Confirmed |
| | | | LRR | | |
| Dk_01_60 | Aegilops sharonensis | 1998 | NB-LRR | 4.81691 | Confirmed |
| Dk_01_61 | Cynosurus cristatus | PI251810 | NB-LRR-CC | 3.07035 | Confirmed |
| Dk_01_62 | Cynosurus cristatus | PI251810 | NB-LRR | 20.3939 | Confirmed |
| Dk_01_64 | Cynosurus cristatus | PI251810 | CC-NB-LRR | 0.944396 | Confirmed |
| Dk_01_68 | Cynosurus cristatus | PI642806 | NB-LRR | 0.940361 | Confirmed |
| Dk_02_02 | Koeleria macrantha | PI206274 | CC-NB-LRR | 3.05767 | Confirmed |
| Dk_02_03 | Koeleria macrantha | PI206274 | NB-LRR | 2.20239 | Confirmed |
| Dk_02_06 | Koeleria macrantha | PI206274 | NB-LRR | 0.864765 | Confirmed |
| Dk_02_07 | Koeleria macrantha | PI206274 | NB-LRR | 0.877035 | Confirmed |
| Dk_02_08 | Koeleria macrantha | PI206274 | CC-NB-LRR | 0.891724 | Confirmed |
| Dk_02_11 | Koeleria macrantha | PI206274 | NB-LRR | 0.934462 | Confirmed |
| Dk_02_13 | Koeleria macrantha | PI206274 | CC-NB-LRR | 0.789584 | Confirmed |
| Dk_02_14 | Koeleria macrantha | PI206274 | NB-LRR | 0.919367 | Confirmed |
| Dk_02_19 | Koeleria macrantha | PI440454 | NB-LRR | 0.596913 | Confirmed |
| Dk_02_20 | Koeleria macrantha | PI440454 | CC-NB-LRR | 0.582753 | Confirmed |
| Dk_02_25 | Koeleria macrantha | PI440454 | NB-LRR | 0.68745 | Confirmed |
| Dk_02_34 | Koeleria macrantha | W617985 | NB-LRR | 0.999572 | Confirmed |
| Dk_02_35 | Koeleria macrantha | W617985 | NB-LRR | 1.24163 | Confirmed |
| Dk_02_36 | Koeleria macrantha | W617985 | NB-LRR | 1.39549 | Confirmed |
| Dk_02_38 | Koeleria macrantha | W617985 | NB-LRR | 0.985448 | Confirmed |
| Dk_02_39 | Koeleria macrantha | W617985 | NB-LRR | 0.837721 | Confirmed |
| Dk_02_42 | Koeleria macrantha | W617985 | NB-LRR | 1.21722 | Confirmed |
| Dk_02_44 | Koeleria macrantha | W617985 | other-NB-LRR | 0.975831 | Confirmed |
| Dk_02_46 | Koeleria macrantha | W617985 | NB-LRR | 1.05232 | Confirmed |
| Dk_03_13 | Cynosurus cristatus | PI251810 | NB-LRR | 0.915483 | Confirmed |
| Dk_03_16 | Cynosurus cristatus | PI595080 | NB-LRR | 1.04424 | Confirmed |
| Dk_03_19 | Cynosurus cristatus | PI595080 | CC-NB-LRR- | 2.82661 | Confirmed |
| | | | CC | | |
| Dk_03_48 | Holcus lanatus | PI462334 | NB-LRR | 3.60074 | Confirmed |
| Dk_03_58 | Koeleria macrantha | PI440454 | NB-LRR | 0.536192 | Confirmed |
| Dk_03_60 | Koeleria macrantha | W617985 | CC-NB-LRR- | 0.886655 | Confirmed |
| | | | CC-LRR | | |
| Dk_04_34 | Hordeum vulgare | Golden | NB-LRR | 3.3888 | Confirmed |
| | | Promise | | | |
| Dk_04_44 | Aegilops bicornis | 2319 | NB-LRR | 4.34313 | Confirmed |
| Dk_04_85 | Aegilops bicornis | 6065 | NB-LRR | 17.8233 | Confirmed |
| Dk_04_88 | Aegilops bicornis | 6065 | NB-LRR | 1.88129 | Confirmed |
| Dk_04_92 | Aegilops bicornis | 6065 | CC-NB-LRR- | 1.14481 | Confirmed |
| | | | CC | | |
| Dk_04_95 | Aegilops bicornis | 6065 | CC-NB-LRR | 1.33593 | Confirmed |
| Dk_04_96 | Aegilops bicornis | 6065 | NB-LRR | 3.51359 | Confirmed |
| Dk_05_11 | Aegilops longissima | 1059 | CC-NB-LRR | 1.5598 | Confirmed |
| Dk_05_14 | Aegilops longissima | 1059 | NB-LRR | 4.92436 | Confirmed |
| Dk_05_15 | Aegilops longissima | 1059 | NB-LRR | 1.42073 | Confirmed |
| Dk_05_16 | Aegilops longissima | 1059 | NB-LRR | 6.34735 | Confirmed |
| Dk_05_24 | Aegilops longissima | 1059 | CC-NB-LRR | 2.89535 | Confirmed |
| Dk_05_29 | Aegilops longissima | 1255 | CC-NB-LRR | 2.20762 | Confirmed |
| Dk_05_30 | Aegilops longissima | 1255 | CC-NB-CC- | 1.51375 | Confirmed |
| | | | LRR | | |
| Dk_05_33 | Aegilops longissima | 1255 | NB-LRR | 1.11984 | Confirmed |
| Dk_05_34 | Aegilops longissima | 1255 | NB-LRR | 1.05088 | Confirmed |
| Dk_05_35 | Aegilops longissima | 1255 | NB-LRR-CC- | 8.22726 | Confirmed |
| | | | LRR | | |
| Dk_05_38 | Aegilops longissima | 1255 | CC-NB-LRR | 3.77169 | Confirmed |
| Dk_05_42 | Aegilops longissima | 1285 | NB-LRR | 4.7744 | Confirmed |
| Dk_05_44 | Aegilops longissima | 1285 | NB-LRR | 2.23065 | Confirmed |
| Dk_05_47 | Aegilops longissima | 1509 | NB-LRR | 2.44642 | Confirmed |
| Dk_05_53 | Aegilops longissima | 1509 | CC-NB-LRR | 3.68828 | Confirmed |
| Dk_05_56 | Aegilops longissima | 1509 | NB-LRR | 3.02411 | Confirmed |
| Dk_06_01 | Brachypodium | Bd21 | NB-LRR | 5.44453 | Confirmed |
| | distachyon | | | | |
| Dk_06_03 | Aegilops longissima | 1059 | NB-LRR | 3.65758 | Confirmed |
| Dk_06_04 | Aegilops longissima | 1255 | NB-LRR | 2.53782 | Confirmed |
| Dk_06_05 | Aegilops longissima | 1255 | CC-NB-LRR | 2.78425 | Confirmed |
| Dk_06_06 | Aegilops longissima | 1255 | NB-LRR | 3.48985 | Confirmed |
| Dk_06_52 | Aegilops searsii | 6229 | CC-NB-LRR | 1.27708 | Confirmed |
| Dk_06_53 | Aegilops searsii | 6229 | NB-LRR | 1.75958 | Confirmed |

[0370] The article “a” and “an” are used herein to refer to one or more than one (i.e., to at least one) of the grammatical object of the article. By way of example, “an element” means one or more element.

[0371] Throughout the specification the word “comprising,” or variations such as “comprises” or “comprising,” will be understood to imply the inclusion of a stated element, integer or step, or group of elements, integers or steps, but not the exclusion of any other element, integer or step, or group of elements, integers or steps.

[0372] All publications and patent applications mentioned in the specification are indicative of the level of those skilled in the art to which this invention pertains. All publications and patent applications are herein incorporated by reference to the same extent as if each individual publication or patent application was specifically and individually indicated to be incorporated by reference.

[0373] Although the foregoing invention has been described in some detail by way of illustration and example for purposes of clarity of understanding, it will be obvious that certain changes and modifications may be practiced within the scope of the appended claims.

1. A method for preparing a library of candidate plant disease resistance (R) genes against at least one plant pathogen of interest, the method comprising
selecting from each of one or more plants of interest a subpopulation of highly expressed nucleotide-binding leucine rich repeat genes (NLRs) from among a population of constitutively expressed NLRs in an organ or other part of the one or more plants, so as to produce a library of candidate R genes,
wherein a highly expressed NLR comprises a relative expression level in the organ or other part of the plant that is greater than the relative expression levels in the organ or other part of the plant of at least 65% of the constitutively expressed NLRs.

2. The method of claim 1, wherein one or more of the NLRs in the population of constitutively expressed NLRs further comprises at least one feature of interest.

3. The method of claim 1, wherein selecting a subpopulation of highly expressed NLRs further comprises selecting NLRs comprising at least one feature of interest.

4. The method of claim 2, wherein the at least one feature of interest is selected from the group consisting of:
(a) the presence of intraspecific variation in the amino acid sequence encoded by an NLR;
(b) the absence of intraspecific variation in the amino acid sequence encoded by an NLR;
(c) the presence of interspecific variation in the amino acid sequence encoded by an NLR;
(d) the absence of interspecific variation in the amino acid sequence encoded by an NLR; and
(e) substantial intraspecific allelic variation in the amino acid sequence encoded by an NLR.

5-7. (canceled)

8. The method of claim 1, wherein the plant or plants of interest do not support the growth or lifecycle completion of the plant pathogen(s) of interest.

9. The method of claim 1, wherein the organ is selected from the group consisting of a leaf, a root, and a stem.

10-22. (canceled)

23. A library of candidate R genes prepared according to the method of claim 1.

24. A transgenic plant comprising a candidate R gene from the library of claim 23, or a collection of transgenic plants, wherein each of the transgenic plants is transformed with a candidate R gene from the library.

25. (canceled)

26. A method for identifying a plant disease resistance (R) gene against a plant pathogen of interest, the method comprising
(i) producing a transformed plant by transforming a host plant with a candidate R gene selected from the library of claim 23, wherein the host plant is a host for the plant pathogen of interest,
(ii) contacting the transformed plant with the plant pathogen of interest under environmental conditions suitable for the development of disease, and
(iii) determining if the transformed plant displays enhanced resistance to the plant pathogen of interest when compared to a control plant lacking the candidate R gene, wherein the candidate R gene is an R gene against the plant pathogen of interest when the transformed plant displays enhanced resistance to plant disease symptoms caused by the plant pathogen of interest.

27. A method for identifying a plant disease resistance (R) gene against a plant pathogen of interest, the method comprising
(i) contacting a transgenic plant or a collection of transgenic plants according to claim 24 with the plant pathogen of interest under environmental conditions suitable for the development of disease symptoms, wherein a control plant lacking the candidate R gene is a host for the plant pathogen of interest and the plant pathogen is capable of causing plant disease symptoms on the host plant, and
(ii) assessing disease symptoms on the transgenic plant(s), wherein a transgenic plant comprises an R gene against the plant pathogen of interest when the transgenic plant displays enhanced resistance to plant disease caused by the plant pathogen of interest, when compared to a control plant lacking the candidate R gene.

28-32. (canceled)

33. A nucleic acid molecule, an expression cassette comprising the nucleic acid molecule and an operably linked heterologous promoter, a vector comprising the nucleic acid molecule or the expression cassette, or a host cell transformed with the nucleic acid molecule, expression cassette, or vector, wherein the nucleic acid molecule comprises a nucleotide sequence selected from the group consisting of:
(a) the nucleotide sequence set forth in SEQ ID NO: 1, 3, 5, 7, 9, 11, 13, 15, 17, 19, 21, 23, 25, 29, 31, 33, 35, 37, 39, 41, 43, 45, 47, 49, 51, 53, 55, 57, 59, 61, 63, 65, 67, 69, 71, 73, 75, 77, 79, 81, 83, 85, 87, 89, 91, 93, 95, 97, 99, 101, 103, 105, 107, 109, 111, 113, 115, 117, 119, 121, 123, 125, 127, 129, 131, 133, 135, 137, 139, 141, 143, 145, 147, 149, 151, 153, 155, 157, 159, 161, 163, 165, 167, 169, 171, 173, 175, 177, 179, 181, 183, 185, or 187;
(b) a nucleotide sequence encoding a polypeptide comprising an amino acid sequence set forth in SEQ ID NO: 2, 4, 6, 8, 10, 12, 14, 16, 18, 20, 22, 24, 26, 30, 32, 34, 36, 38, 40, 42, 44, 46, 48, 50, 52, 54, 56, 58, 60, 62, 64, 66, 68, 70, 72, 74, 76, 78, 80, 82, 84, 86, 88, 90, 92, 94, 96, 98, 100, 102, 104, 106, 108, 110, 112, 114, 116, 118, 120, 122, 124, 126, 128, 130, 132, 134, 136, 138, 140, 142, 144, 146, 148, 150, 152, 154, 156, 158, 160, 162, 164, 166, 168, 170, 172, 174, 176, 178, 180, 182, 184, 186, or 188,
(c) a nucleotide sequence having at least 75% sequence identity to at least one of the nucleotide sequences set forth in (a), wherein the nucleic acid molecule is capable of conferring to a plant resistance to a plant disease selected from the group consisting of wheat stem rust, wheat stripe rust, wheat leaf rust, wheat blast, and wheat powdery mildew; and
(d) a nucleotide sequence encoding a polypeptide having at least 75% amino acid sequence identity to at least one of the full-length amino acid sequences set forth in (b), wherein the nucleic acid molecule is capable of conferring to a plant resistance to a plant disease selected from the group consisting of wheat stem rust, wheat stripe rust, wheat leaf rust, wheat blast, and wheat powdery mildew.

34-39. (canceled)

40. A transgenic plant or seed comprising stably incorporated in its genome a polynucleotide construct comprising a nucleotide sequence selected from the group consisting of the nucleotide sequences of (a)-(d) of claim 33.

41. A method for producing a plant with enhanced resistance to a plant disease, the method comprising introducing a polynucleotide construct into at least one plant cell, the polynucleotide construct comprising a nucleotide sequence selected from the group consisting of the nucleotide sequences of (a)-(d) of claim 33.

42-46. (canceled)

47. A method of limiting a plant disease in agricultural crop production, the method comprising planting a seed according claim 40, and growing a plant under conditions favorable for the growth and development of the plant.

48. (canceled)

49. A human or animal food product produced using the plant or seed of claim 40.

50. (canceled)

51. A method for preparing a library of candidate plant pest resistance (R) genes against at least one plant pest of interest, the method comprising
selecting from each of one or more plants of interest a subpopulation of highly expressed nucleotide-binding leucine rich repeat genes (NLRs) from among a population of constitutively expressed NLRs in an organ or other part of the one or more plants, so as to produce a library of candidate R genes,
wherein a highly expressed NLR comprises a relative expression level in the organ or other part of the plant that is greater than the relative expression levels in the organ or other part of the plant of at least 65% of the constitutively expressed NLRs.

52. A library of candidate R genes prepared according to the method of claim 51.

53. A transgenic plant comprising a candidate R gene from the library of claim 52, or a collection of transgenic plants, wherein each of the transgenic plants is transformed with at least one candidate R gene from the library.

54. (canceled)

55. A method for identifying a plant pest resistance (R) gene against a plant pest of interest, the method comprising
(i) producing a transformed plant by transforming a host plant with a candidate R gene selected from the library of claim 52, wherein the host plant is a host for the plant pest of interest,
(ii) contacting the transformed plant with the plant pest of interest under environmental conditions suitable for the development of disease symptoms or other damage to the transformed plant, and
(iii) determining if the transformed plant displays enhanced resistance to the plant pest of interest when compared to a control plant lacking the candidate R gene, wherein the candidate R gene is an R gene against the plant pest of interest when the transformed plant displays enhanced resistance to plant disease or other damage caused by the plant pest of interest.

56. A method for identifying a plant pest resistance (R) gene against a plant pest of interest, the method comprising
(i) contacting a transgenic plant or a collection of transgenic plants according to claim 53 with the plant pest of interest under environmental conditions suitable for the development of disease symptoms or other damage, wherein a control plant lacking the candidate R gene is a host for the plant pest of interest and the plant pest is capable of causing disease symptoms or other damage to the host plant, and
(ii) assessing damage on the transgenic plant(s), wherein a transgenic plant comprises an R gene against the plant pest of interest when the transgenic plant displays enhanced resistance to plant disease or other damage caused by the plant pest of interest, when compared to a control plant lacking the candidate R gene.

57-61. (canceled)

The application's sequence listing, which the Patent Office published only in electronic form, follows.

SEQUENCE LISTING (188 sequences)

SEQ ID NO: 1 - DNA, 2532 bp, Aegilops longissima
  CDS (1)..(2532)
atggaggtcgttaccggggcgatgagcaccctcctgcccatcctcggcaaccttctcaaggaggagtacaacctgcagaagaacaccaggggcgagatcaagttcctcaaagcagagctggagagcatggaggctgccctcatcaaggtttcagaggcaccgctggaccagccacctgacaaacaagtcaagctgtgggcgagggatgtcagggatctgtcctatgagattgaagacaacgttgacaaattcttggcatgccttgaatgtcagcagcaaaagaggccacacagcttcatgggtttcattcatagaagcatcaacatactgacaaagggtaaggtccgacacaatataggcatggatatcaaagacatcaagaggcgcatcaaagaggtcagtgagaggcgtgataggtacaaggttgatagtgttgtgcccaagtccactagcacaagtactgatacacttcgccagttagccttgttcaaaaaggcgacagagcttattggcaccgaagagaagagccttgaaatagtcaagatgctaatggagggagacgaggttttcaagaaacagcccaagatgatctctattgttggctttggaggcttagggaagacaactcttgctaacgtggtatatgagaagctccgtggggactttgattgtggagcttttgtttctgtgtctcttaatcctgacatgaagaagcttttcaagagtttgctccatcaacttgacaagggcaattacaagaacatcatggacgagtcagcgtggagcgaaacacaactcataagtgagatcagagatttccttcgagataagaggtacttcattgtcattgatgacatatgggataaatctatgtggaataatattagatatgctctgattgagaatgaatatggtagtagagtaatcgcgacaactcgcattctagatgttgccaaagaagttggtggtgtttatcagcttaaacctctttctactagtgactcaagaaagttattctaccaaagagtatttggaaatgaggacaagtgccctcatattcagttggctgaagtaagtgagaacattttgcagaaatgtggtggagtaccattggctatcattacactggctagtatgttggctggtaaaaaggaacatgaaaatgcatatacgtattggtctaaggtgtaccaatctatgggttctgggctaggaaataaccctgacctgatggacatgaggaggatactatatatcagttactatgtcttacctccaaatctgaagacctgtttactgtatctcagtttgtatccagaggattatgatattaaaaccaaacagttgatatggaaatggataggtgaaggattcattcatgaagagcaggggaagagcttgtatgaagtaggagaggattacattgctgagctcattaacaaaagcctggtccaaccaatgaaaatcaatattgctaataaggcaagctctgtccatgtacacgacatggtgcttgaccttgtcacttccttgtcaaatgaggagaactttctcacaacattgggtggtcagcataccaggtcactgccaagtaagatccgtcgactgtctctccaaataagtaatgaagaggaggtggagcaaatgccaaccatgagcagcttgtcccatgtgaggtcacttactgtgttcagtaaagacctcagtttgctgtcggcactttcaggttttcttgtcctgcgtgcattggatttaagtggttgtactgaagtgggtaatcatcatttaaaggatatttgcaatttatttcatctgaggtatcttagcctagaagggacatctatcactgagatcccgaaagatatcagcaacctacagcttttacaagtgctagatatgaggcacaccaaaatggcaaaattgccatcaacctttgtgcagctaagacaactggtgttcattgacatgggtattaggatggcctcaacattgcttctagaagcaatgtccaccttgcccttcctctcttcccttgcaactggattaggagaaatgagagaggaagagctccagatacttgggagcatgccatctctgagtgacctctctatatttcaattgtatctgggacaagtcgcagataaaaggcttgtcattgacaatcgttttcccttccggtctctgacaaggttcagtataaacggtagcggcttcattggtttcatgttttcacaaggaaccttgcaaaagctccaaatcctggagttagatatttatgttaagagaacaaaagaccgatttggtgattttcaatttgggctggagaacctctcttcactggagcatgtctatgtgctgtctcgtggtagtgattgtgggctgaccgatgcacttcagagagagatagatattaatcccaacaagcccacactgacggtgaagaagaacatgatgacgagcattcttcacagagccaggatacatttttttgtggaacaagctgcagcagtaggagagctgtccatagaggaa

SEQ ID NO: 2 - protein, 844 aa, Aegilops longissima
MEVVTGAMSTLLPILGNLLKEEYNLQKNTRGEIKFLKAELESMEAALIKVSEAPLDQPPDKQVKLWARDVRDLSYEIEDNVDKFLACLECQQQKRPHSFMGFIHRSINILTKGKVRHNIGMDIKDIKRRIKEVSERRDRYKVDSVVPKSTSTSTDTLRQLALFKKATELIGTEEKSLEIVKMLMEGDEVFKKQPKMISIVGFGGLGKTTLANVVYEKLRGDFDCGAFVSVSLNPDMKKLFKSLLHQLDKGNYKNIMDESAWSETQLISEIRDFLRDKRYFIVIDDIWDKSMWNNIRYALIENEYGSRVIATTRILDVAKEVGGVYQLKPLSTSDSRKLFYQRVFGNEDKCPHIQLAEVSENILQKCGGVPLAIITLASMLAGKKEHENAYTYWSKVYQSMGSGLGNNPDLMDMRRILYISYYVLPPNLKTCLLYLSLYPEDYDIKTKQLIWKWIGEGFIHEEQGKSLYEVGEDYIAELINKSLVQPMKINIANKASSVHVHDMVLDLVTSLSNEENFLTTLGGQHTRSLPSKIRRLSLQISNEEEVEQMPTMSSLSHVRSLTVFSKDLSLLSALSGFLVLRALDLSGCTEVGNHHLKDICNLFHLRYLSLEGTSITEIPKDISNLQLLQVLDMRHTKMAKLPSTFVQLRQLVFIDMGIRMASTLLLEAMSTLPFLSSLATGLGEMREEELQILGSMPSLSDLSIFQLYLGQVADKRLVIDNRFPFRSLTRFSINGSGFIGFMFSQGTLQKLQILELDIYVKRTKDRFGDFQFGLENLSSLEHVYVLSRGSDCGLTDALQREIDINPNKPTLTVKKNMMTSILHRARIHFFVEQAAAVGELSIEE

SEQ ID NO: 3 - DNA, 2367 bp, Aegilops sharonensis
  CDS (1)..(2367)
atggcagagattgtgattcttctagccattagaaagatcggaatcgccttggcatgtagagcggcaaaccaggccaacttgcagtttggaaagtacaaagcacaactacaagagctacatggcagtatgggtcgtgttgcgagggagcttcgcataatgcatgatgtgctctgtcacatggatattcgaaaccgcaataatcaagtttatgacggctggttggaggaggtacagaaagtagcacatgtgatggaggacatggtggatgagtacttatatctagttggtcgggaacatgatattgggtcttgtttttacctgaaaaggggcttcagaaaatccagatctctgctttctatgaaccagttagctttcaaggtgaaggaaatagagaaagaccttagtcatctatcagagacaaacaaacgttgggctcccatgacaagcagcggggccaccagcagctgtgattacattgtcaagaggggccaagatctagcaaatatttcacgttcccttgatgaagaagatcttgtgggggtggatgaaaacagagaaaaacttgagcagtggttggcaggtgatgatttggaaggctcggtcatatcgctgcttggaatgggagggcttggtaaaacaactttagctgcaaatgtctacaggaatgagagaaagaaattccaatgccatgcctgggtctccgtctctcaaacttattctagagaagatgtcttgaggaatatatgcaaggaacttttcaaagataatgttactgttctatctaaatctgcagctatggacatcacatgccttgaagagacactgaagagttttctgaagcaacaaaagtacttgatcatattggacgatgtttggactccagaaacatttgatgatttgtctaggatgcttattcataatgataagggaagtagactgataatcacaacaagggaaggcgatgttgctgcacttgcctctccaggacatatcttaacactagaagctttaccagaagataaggcatgggatctcttttgtaaaaaaacatttccaaaagaaacaaatcatgattgtcatgcggagttagagcctttgtccagggaaatagttagcaggtgtaaaggcttacctcttgctattgtgtcagttgctagcctcttgcgtgtgcgtgagaaaactgtggaagaatggagaagaataaataaccaactgagctgggagataattaataattcgaggctcgaccacataaggaatgttttgcatctgagcttcatctaccttccaacacacttgaagagttgttttttgtactgcagcttatttccagaagactatcttctcaaaaggaaaaaacttgtaaggttatggatagcagagggattcatcgaggggaggggtgaaagcacattagaagaagtagcagaaggctatctgaaggagttggttgatagaaacatgctacaacttgtcgagatgaactcatttggtaggataaaagaattcaaaatgcatgatatattacgtgaactggcagttgatttgtgccagaagaactgttttggcgttacacaagaggctaaatgtgaggggtctcttgagatggatggacgccgattgatacttgacaaaataaacaatgatgttcaacagtcattttctggtttacaccaacttcgaactgtgattacatcaggccatggtaagtcaccattcactctactacctctcctatgcaaggagtcaagatacatgacagtgctagaattaagtggtatacccatcaagaagattccagatgctattggagatctttttaatctccgccatttgggtttgcgtaattcaaaggtgaaaatgctcccgaggtctgttgagaagctttcaaatttgttgacactagacctttgtaaatctgacatacatgagttccctagtgggattgtgaaacttaagaagctcaggcacttatttgttgagaaaataatcgatccagattggagaaacattaatcatctcagtggtatgtgtatccccaatggacttgggaatctaacaaacctgcaaacgctacaagcattggaagtacatgatgagtcccttagacatctaggggagctgaggcaactgaaaagcttgaggttattgaatgtgaagggaatctactgcagacgcatcagtgaatctctagttcaaatgaggcatttgtccttgctatctgtgaatgcaagtgatgggaacgaggttctcttgttgaatgttctcctgccaagcctgcaaaagctaagattgagaggacggctagcgaaaggtgcgttggatgagtctcctctcttccaagctgttggagggcagaattttgta

SEQ ID NO: 4 - protein, 789 aa, Aegilops sharonensis
MAEIVILLAIRKIGIALACRAANQANLQFGKYKAQLQELHGSMGRVARELRIMHDVLCHMDIRNRNNQVYDGWLEEVQKVAHVMEDMVDEYLYLVGREHDIGSCFYLKRGFRKSRSLLSMNQLAFKVKEIEKDLSHLSETNKRWAPMTSSGATSSCDYIVKRGQDLANISRSLDEEDLVGVDENREKLEQWLAGDDLEGSVISLLGMGGLGKTTLAANVYRNERKKFQCHAWVSVSQTYSREDVLRNICKELFKDNVTVLSKSAAMDITCLEETLKSFLKQQKYLIILDDVWTPETFDDLSRMLIHNDKGSRLIITTREGDVAALASPGHILTLEALPEDKAWDLFCKKTFPKETNHDCHAELEPLSREIVSRCKGLPLAIVSVASLLRVREKTVEEWRRINNQLSWEIINNSRLDHIRNVLHLSFIYLPTHLKSCFLYCSLFPEDYLLKRKKLVRLWIAEGFIEGRGESTLEEVAEGYLKELVDRNMLQLVEMNSFGRIKEFKMHDILRELAVDLCQKNCFGVTQEAKCEGSLEMDGRRLILDKINNDVQQSFSGLHQLRTVITSGHGKSPFTLLPLLCKESRYMTVLELSGIPIKKIPDAIGDLFNLRHLGLRNSKVKMLPRSVEKLSNLLTLDLCKSDIHEFPSGIVKLKKLRHLFVEKIIDPDWRNINHLSGMCIPNGLGNLTNLQTLQALEVHDESLRHLGELRQLKSLRLLNVKGIYCRRISESLVQMRHLSLLSVNASDGNEVLLLNVLLPSLQKLRLRGRLAKGALDESPLFQAVGGQNFV

SEQ ID NO: 5 - DNA, 2751 bp, Aegilops sharonensis
  CDS (1)..(2751)
atggccgaagttgtgattctcttggcagtggcaaagatcggtgtagctctggggaatgaagcaatgaaccaggctactttacagttcaataacttcataacacagctaacagagcttcaaggaagcatgggtcgcatcagaagggagctcagattgatgcatgaatatctttgccgaatggacatacggaatcgcaacaatcagacatatgaaatctgggtggaggaggtgagaatgtttgttcatgggattgaggacattgtggatgagtatttgcatcttgttggtcagaaacatgacagtggatggagtgcctgtctgaagaaaggattcaaacagccaaatgttttcttctctttaaacaggatagcttctttggttaaggaagcggaggtcaatcttgtgcacctgttccaggctaaagatcgatgggtgtcaatggtagatagtgggtatatgaatgactcaagttacattgttgagaggtctcagcatctagcaagcacttcacgttcccttgccgaagaagatctcgtggaggttgatggaaacagaaaaaagcttgagcagtggttggcaggtgatgagttggaacgctctgtgatagtgctgcatggtatgggagggcttggtaaaacaactttggctgcaaatgtctacaggaaggaaagtgaaaattttgattgccactgttgggtctctgtctctcaaacttattccagagaagatgttttgaaaaaattaatcaaggagcttttcaaagataaagccattgttccatctaatattgagaccatggacatcataagccttgaagaggcactgaagaattttttagagcagcgtaagtatttgatcatgctggatgatgtttggactcctgaagcattccatgatctttctggggtggttattcgtaacaagaagggcagcagagttgtaatcacaaccagggtaggcaatgttgctggacttgcttctcaaggacaggtcttaacactaaaacctctatcaaaggatggatcatgggaactcttctgtaagacagcttttcccatagatacaaaatgtgagtgtcccacagaactgacagaattagcacatgaagtggttgacaagtgtaaaggcataccccttgcaattgtctctattggcaagctcctctttgtacgtggcaagaccaaagaggaactgaagcgaatacatgaccagctcgactgggagctaattaacaatccaagcttggaacatgtcaggaatatcctttatttgagttacttgtaccttccgacatacttgaaaagttgttttctatactgcagcttgttcccagaggactatcttttcaaaaggaaaaggctgatacggttgtgggtagcagagggcttcgtcaagggaaggggtgaaagcacaatggaggaagtggcggaaggttatctagaagagttggttcacagaaatatgcttcaagttgatacaagaaacccatttggtaggataaaatcattccggatgcatgatattgtacgtgagttggcagtagatttgtgtcgccgggaatgctttggtgttgtttatgaggaggataaatacatggaatctcttgatgagtcggatgcacgtcgactggtaatacacaaaatgagcaaggatatttatcagtcagtatcaggtgtacaccgtctccgctctgttatcgcactggacatcaatattccatcatccactctactgcctctaatagcaaagaagtccagatatatgtcggtgctggagttaagtggcctacccattgagaaggttccagatggtattggagatcttttcaatctccgctatttgggtctgcgtggttcaaaagtgaagctccttcccaggtctatcgagaaactttcaagtttgttgacactggacctttcagggtctggcatgaaggagctgcctagaggcattggtgaactcaaaaagcttaggcagttattcactgacaaagctagtgatcgattcaggagagatttccggtgcggcagtggtgtatgcattcccaagggccttgagaacctgacaagtctgcagacactagtatcattggaagcgcaggatgagtccgttagacagttgggggagctgaggcaactgagaagcttggagatatggaatgtgaaaggaacctactgtggacatatatgtgcttctcttgccgagatgcgacacctttcctatctacatgtgaatgcaagccaagacaatgaggttctccgggtgagtggtctacccccaaacctgcaaaggcttagcttgactggccgattagcggaaggcacattggtagagtctcctctgttccaaactgcggggcggaacctgtattcactgtctctatcttggtcccagatgatagaagaccccttaccatcactttctcgattgtcaaatttgacggacctaatgctcaccagagcatacagcggaaagcagatgacatttcttgccgggtggttccccaagctaaaaaccctgagactgagagacctgccaaatctggaggttctagagatgaaggaaggtgccttggtgagcctggaaatattaacactagtcagccttgaaggcatggtggaggtcccacctggcatagagttcctcgcgcacgtaaagcatatttcgttccgggaaatcaccagcgagcttttgactttgctgcgacaatgtcctagaactcaaggggtgcagtggcggcatactctccgg

SEQ ID NO: 6 - protein, 917 aa, Aegilops sharonensis
MAEVVILLAVAKIGVALGNEAMNQATLQFNNFITQLTELQGSMGRIRRELRLMHEYLCRMDIRNRNNQTYEIWVEEVRMFVHGIEDIVDEYLHLVGQKHDSGWSACLKKGFKQPNVFFSLNRIASLVKEAEVNLVHLFQAKDRWVSMVDSGYMNDSSYIVERSQHLASTSRSLAEEDLVEVDGNRKKLEQWLAGDELERSVIVLHGMGGLGKTTLAANVYRKESENFDCHCWVSVSQTYSREDVLKKLIKELFKDKAIVPSNIETMDIISLEEALKNFLEQRKYLIMLDDVWTPEAFHDLSGVVIRNKKGSRVVITTRVGNVAGLASQGQVLTLKPLSKDGSWELFCKTAFPIDTKCECPTELTELAHEVVDKCKGIPLAIVSIGKLLFVRGKTKEELKRIHDQLDWELINNPSLEHVRNILYLSYLYLPTYLKSCFLYCSLFPEDYLFKRKRLIRLWVAEGFVKGRGESTMEEVAEGYLEELVHRNMLQVDTRNPFGRIKSFRMHDIVRELAVDLCRRECFGVVYEEDKYMESLDESDARRLVIHKMSKDIYQSVSGVHRLRSVIALDINIPSSTLLPLIAKKSRYMSVLELSGLPIEKVPDGIGDLFNLRYLGLRGSKVKLLPRSIEKLSSLLTLDLSGSGMKELPRGIGELKKLRQLFTDKASDRFRRDFRCGSGVCIPKGLENLTSLQTLVSLEAQDESVRQLGELRQLRSLEIWNVKGTYCGHICASLAEMRHLSYLHVNASQDNEVLRVSGLPPNLQRLSLTGRLAEGTLVESPLFQTAGRNLYSLSLSWSQMIEDPLPSLSRLSNLTDLMLTRAYSGKQMTFLAGWFPKLKTLRLRDLPNLEVLEMKEGALVSLEILTLVSLEGMVEVPPGIEFLAHVKHISFREITSELLTLLRQCPRTQGVQWRHTLR

SEQ ID NO: 7 - DNA, 966 bp, Aegilops sharonensis
  CDS (1)..(966)
atggccgaggttgtgaccggagcaatgagcaccctccttcctaagctagccgacttaatcacggaggagtacaaccttcacaagggtatcaggggcgaggtcatgttcctcaaagctgagatggaaagcatggagacagctctccttaaagtttccgaggcaccaatcgaccagccaccggacatccaaatcaagctttgggccaaggctgtgagggacctgtcatatgaccttgaagacagtatcgacagattcatggtgcgcatcgaaacccatggacaagacaagtcccatagcttcaggaacttcattgataagagcatcagcttgctgaccaaaggcaagattcgtcataagatcgccatcgatatcaaagacatcaagagccgcatcaaggaggtcagcaagcggcgtgataggtacaaggttgacaatgtggccgctgccaagtcaactggtccaagtgttgatacccttcgtttgtcagccttgtatacaaaggccagtgagcttgtcggcactgacgagaagagccttgaggtagtcaaaatgttgacggagggagatgaggcttccaagaaacagctgaaggtggtatccattgttggattaggtggattaggcaagacaacacttgccaatgcagtgtatgagaagcttaaagcgcaatttgatattcaaaaacaaaaaccgcaattcgattgtacggcttttgtttccgtgtctcttaatcctagcatggataagattttcaagagcttgctccatcaacttaccaacctgaagtacgagaatattgaggcaacacggggtgaagcgcaactcatcagcgagataagaacattccttggaaacaagaggaaagacgtcgtcatcttgagcttcgtcaccaggcccggcggacgtacttgcaatgtgttagcgaccaggctcgccagactctggagaacctgccggctgagctgc

SEQ ID NO: 8 - protein, 322 aa, Aegilops sharonensis
MAEVVTGAMSTLLPKLADLITEEYNLHKGIRGEVMFLKAEMESMETALLKVSEAPIDQPPDIQIKLWAKAVRDLSYDLEDSIDRFMVRIETHGQDKSHSFRNFIDKSISLLTKGKIRHKIAIDIKDIKSRIKEVSKRRDRYKVDNVAAAKSTGPSVDTLRLSALYTKASELVGTDEKSLEVVKMLTEGDEASKKQLKVVSIVGLGGLGKTTLANAVYEKLKAQFDIQKQKPQFDCTAFVSVSLNPSMDKIFKSLLHQLTNLKYENIEATRGEAQLISEIRTFLGNKRKDVVILSFVTRPGGRTCNVLATRLARLWRTCRLSC

SEQ ID NO: 9 - DNA, 1968 bp, Aegilops sharonensis
  CDS (1)..(1968)
atggaaccccttacctttgatgactccaaaaggttgttttttagaagagcatttggtcccgaggatttatgccatcctcatctggaaaaagtctctaatgacatattaagaaaatgttctggcctaccattggctattattactgtgtctagtttgttggctgatcagcatgcagaagatgaatggaagagagtgttagctgctattggttctgcacttgcaaaagattctggtgctgataagatgacaaagatattatctctgagctactttgatcttcctcaccatctgagagcctgtttgttgtacttgagtatatttccagaagattctgctatctggaaacgacatttgatacataaatggattgctgaaggattcattcacgagaaacaagggcgaaatcgatatgaaataggtgagagttattttaacgagctcattaatagaagcttgatccaaccggttggtgcaacatttagccaggtagagtcatgccaagttcatgatatcattctggatttcatcacatgcaaagctgccgaagagaactttgtcactaaattcagtgatgtagaggatgggcaaaattcatgttacagtgtccggaggctttttgtcgggaataacagtaatgaaaaggttgccatatcagccccgattctctctcatgttcggtcgctcattatatatgcgcatgcccctcaagtttctttgttggctttcccagttcttcgtgtcttggacctaggaaagtgctggtggttagaagatcatcatgttgcaaatattgaaaagctgcttcttctgaagtacctgtgccttgtaaatgttacactcctccccaaaaaatttggagaactgcagtatttggaaacactgggcatagcaaataccagaactctagaaatgccattagctgttacaagccttcaacggctggccagtctaaacgttcattaccacattagttttcctgatggaatgattggtaagatgcaaagcttggaagagctagagacgcttggtgtccactcctatgaacaagggaagtcactacaagaattcagccagctaaccaagctgtggaggctgaaagtactgctggggatgtttgaattgtgggaaggaacaggtcaaattgaggaccttcacggttacttgggaacattagtatcttcatgcaaccttcgtcatctaaatatatccaagctaagctcgaacgtcttagctgtcaaaacttactttccactgtcactggagtcgtggtgtccgactactccctgcagccttcaggagcttcacataacatactgtttcattgacaagattccaaactggatgagcttgctccgcaatcttagagaattagaaatctatgtcgtcagtgtgagaccagaagatgttaggatccttgggtcaataccaactttgcttattctcaaactaaagactttcaatggcaccgatggaagaattctcattcatgggttcagcaatttgaaatatttccatttggaactcctttattgtgggacctcactggagtttgaagagggatcaatgccaaggcttgagcacctggagctggagttccgtgtgcatcagatggattgcctaaatggttctcccaatttcggtatccaacacctctctgccctccgcaaagttgaggtctgtattttgtgcaactttggcaatagagacaatccgttggcaggtttagaatgctgctttggcaaattcattggaatgattattgaagctgacatcgaggcgcttcccaattgttccagtttccttttacaatatggaaatgtaccattcggaaacgtggcctgcgaacattacacaaaaattgtggagacagactgtgagaaggaagatgaagcaggacgaggaaaagttggaagtgcaggagcaacccactggcattttggagaaaattactttcgaatgtcatttggt

SEQ ID NO: 10 - protein, 656 aa, Aegilops sharonensis
MEPLTFDDSKRLFFRRAFGPEDLCHPHLEKVSNDILRKCSGLPLAIITVSSLLADQHAEDEWKRVLAAIGSALAKDSGADKMTKILSLSYFDLPHHLRACLLYLSIFPEDSAIWKRHLIHKWIAEGFIHEKQGRNRYEIGESYFNELINRSLIQPVGATFSQVESCQVHDIILDFITCKAAEENFVTKFSDVEDGQNSCYSVRRLFVGNNSNEKVAISAPILSHVRSLIIYAHAPQVSLLAFPVLRVLDLGKCWWLEDHHVANIEKLLLLKYLCLVNVTLLPKKFGELQYLETLGIANTRTLEMPLAVTSLQRLASLNVHYHISFPDGMIGKMQSLEELETLGVHSYEQGKSLQEFSQLTKLWRLKVLLGMFELWEGTGQIEDLHGYLGTLVSSCNLRHLNISKLSSNVLAVKTYFPLSLESWCPTTPCSLQELHITYCFIDKIPNWMSLLRNLRELEIYVVSVRPEDVRILGSIPTLLILKLKTFNGTDGRILIHGFSNLKYFHLELLYCGTSLEFEEGSMPRLEHLELEFRVHQMDCLNGSPNFGIQHLSALRKVEVCILCNFGNRDNPLAGLECCFGKFIGMIIEADIEALPNCSSFLLQYGNVPFGNVACEHYTKIVETDCEKEDEAGRGKVGSAGATHWHFGENYFRMSFG

SEQ ID NO: 11 - DNA, 2751 bp, Aegilops sharonensis
  CDS (1)..(2751)
atggcggagattgtgattcttctagccattaaaaagatcggaaatgccttggcaaatggagcggcagaccaggtgagcatgcagtttgcgaagtacgggaagcaaaaagtagagctacagggcagcatgggtcgtgttgcaagggagctttgcgtcatgcatgatgttgtttgtcagatggacattcgaaacagcaacaatcaagtatatgagggctggttggaggaagtacggaaggtagcacatgtgatggaggacatagtggatgagtatgtgtatctaattgatcaggaacatgatatagggtgttgcttttacctgaagcaaggggttagaaaaccaagatctctgctttatttgaaccagatagctttcaaggcgaaggaaatagagaaagaccttgcacacctgtcggagataaaaaatcgttgggtccccatgatacagaacggggatactagcagctcgaattacattgtcaagaggtcccaagatctagcaaacatttcacgttcccttgatgaagaagatttagtgggggtggataaaaacagagagatacttgagcagtggttggcaggtgctgatttggagtgctccgtgatagcactgcttggaatgggaggacttggtaaaacaactttagctgcaaatgtctataggaaggagagagagcaattccagtgccacgcgtgggtctccatttctcaaacttattctagagaagatgtcctgaggaatacattcaaggaacttttcaaagataacgtcagtgttctgtctaataccgcggcgatggacatcacatgccttgaagagacactgaaaagatttctggagcaacataagtatttgatcatactggatgatgtttggactccacaagcatttgatgacttgtctagagtgcttattcataatgacaagggcagcagattgataattacaacaagggaaggtgatgttgctgcacttgcctctccaggacatatcttaaagctagaagctttaccagaagacaaggcatgtgatctctttcataagaaagcctttccaacagataaaaatcatgaatgtcctgccgagttgaagtctttgtcccacgaaatagttagcaagtgcaaaggcttgcctctcattattgtgtcaattggtaacctcttgcgtgtgcgtgagaaaactgtggaagaatggagaagaataaatgaccaactgagttgggagctaattaataacttgaggcttgatcacataaggaatgttttgcatctgagcttcatctaccttccagcacacttgaaaagttgtttcctatattgcagtttatttccagaagactatcttttcaaaaggaaacaacttgtacggttatggatagcagagggattcattgaggagaggggtgaaagcacattagaagaagtggcagaaggctatctgaaggagttaattgatagaaacatgctacaacttgttaaaaggaactcatttggtaggacgaagaaattgagaatgcatgatatcttacgagaattggccgttgatttgtgtcaaaaggattgttttggtgttacatatgaggataaatgtgtgggttctcttgagatggatgggcgtcgattggtaatgcataagctaaagaagaatattcagcactcgttttctggtatacaccaacttcgaaccgtcattgtagtggatgataacatgccatcattcactctactacctctgttatgtaagaagtcaagatatatgacagtgctagaattaagtggcttacccattgagaagattccagatgctattggagatctttttagtctccgccatttaggtttgcgtaattcaaaagtgaagatgctcccgaggtctattgaaaagctttcaaatttgttgacactggacctttatagattagatatacattatttgcctagtggggttgtcaaactgaagaagcttaggcacttatttgctgagaaaatgaattatctagattggagggatattcattctcacagtggtatgactatccccattgatcttgggaatctaacaaacctgcaaaccctacgaacattggaagtgcagggtgagtcagttagacatttgggggagctgaggcaactgagaagcttgaggttatcaaatgtaaagggaatctactgtggacgcatccgtgagtctctagttcagatgcagtatttgtccaagctatctgtgaatgcaagtgatgagaacgaggttctcttgttgaacgtcctcccgccaaatctgcaaacgctatcgttgagaggacgattagagcaagggtcgttggatgagtctcctctcttccaatctgatggaggacaaaacttgtgtgcattggctctgtcttggtcacaactgagaaaagacccactgccatcgctttctttgttgtcgaacttgacacttctacacttcaccagagcgtacaacggagagcagctggcatttctcactgggtggtttcccaagctaaagattctctttctaagagacctgcctaatctgaaccagctagagatacagcaaggtgccatggcgggcctggaaagattatccctagtcaacctcgacagcatgacggaggtcccacctggcattgagttcctcgtgtcccttcagtatctggtcttccacgaaatcgccggtgacttcttgacgttgctgcgccaatgctctgcgattcgagggaagcagtggcatcatactctccggctt

SEQ ID NO: 12 - protein, 917 aa, Aegilops sharonensis
MAEIVILLAIKKIGNALANGAADQVSMQFAKYGKQKVELQGSMGRVARELCVMHDVVCQMDIRNSNNQVYEGWLEEVRKVAHVMEDIVDEYVYLIDQEHDIGCCFYLKQGVRKPRSLLYLNQIAFKAKEIEKDLAHLSEIKNRWVPMIQNGDTSSSNYIVKRSQDLANISRSLDEEDLVGVDKNREILEQWLAGADLECSVIALLGMGGLGKTTLAANVYRKEREQFQCHAWVSISQTYSREDVLRNTFKELFKDNVSVLSNTAAMDITCLEETLKRFLEQHKYLIILDDVWTPQAFDDLSRVLIHNDKGSRLIITTREGDVAALASPGHILKLEALPEDKACDLFHKKAFPTDKNHECPAELKSLSHEIVSKCKGLPLIIVSIGNLLRVREKTVEEWRRINDQLSWELINNLRLDHIRNVLHLSFIYLPAHLKSCFLYCSLFPEDYLFKRKQLVRLWIAEGFIEERGESTLEEVAEGYLKELIDRNMLQLVKRNSFGRTKKLRMHDILRELAVDLCQKDCFGVTYEDKCVGSLEMDGRRLVMHKLKKNIQHSFSGIHQLRTVIVVDDNMPSFTLLPLLCKKSRYMTVLELSGLPIEKIPDAIGDLFSLRHLGLRNSKVKMLPRSIEKLSNLLTLDLYRLDIHYLPSGVVKLKKLRHLFAEKMNYLDWRDIHSHSGMTIPIDLGNLTNLQTLRTLEVQGESVRHLGELRQLRSLRLSNVKGIYCGRIRESLVQMQYLSKLSVNASDENEVLLLNVLPPNLQTLSLRGRLEQGSLDESPLFQSDGGQNLCALALSWSQLRKDPLPSLSLLSNLTLLHFTRAYNGEQLAFLTGWFPKLKILFLRDLPNLNQLEIQQGAMAGLERLSLVNLDSMTEVPPGIEFLVSLQYLVFHEIAGDFLTLLRQCSAIRGKQWHHTLRL

SEQ ID NO: 13 - DNA, 2907 bp, Aegilops sharonensis
  CDS (1)..(2907)
atggtcatccttccaatatatggcattggaggcattggcaagacaaccttggcacaactggtattcaatgaccaacagttcgaagactacactcgggtgtgggtatatgtttcccaggaatttaacttgaataagataggcaactccataataacacagttaacagacaagatcagcaatatatctaccaaacagatgcttcataaacgccttaaagacctgtttgccggtaagaggatccttattgttttagatgatctgtgggaggagaacccaaaagagttcgataaactgaaggttatgctagggcttggcatgggaagtaaggtgattatagtaactacacgtgatggaggcctcgcaaggaaattttgtagtcctgcagttacaccatacaagctggagactttgacggttgatgagtgctggactataattaaacataaagctgactttgaaaaccgagtggatcaagaacaattggagcatataggaagggagattgcagccaaatgtggaggagtggccttagcggctcaatcacttggatacatgttgaacggcatgacttcagatgaatgggagtcggtgagagatagttatatctggaatctatcgagttcagagggccatgaagtgcttgcgtccttacagttaagctatagccacatgcctgattggttgaagttgtgcttttcctattgtgcaatatttccaaaaggtcacaacatagtgaagtatgatctaatttaccaatggattgctcttggattcatcaagcaatctaggatgtttgattttatgcagctctccaagaattatgtcagacaacttttggggatgtccttccttcaatattcaaagacacctttgagtgacagaaatcaagacaaagatgctacattcttcacgatgcatgacctagtgcacgatctcgcaaaagagatgttatcccatcaactaaacactggaggaaataaatgccgctatgcattgctcacagattgtagcaagccactgcagtttaccgtgaattttcctgcaaatataaaggcgctgcgttatcaggactgtggcggacgagaactttgtggtggtgcattttcgtcagctaagtgcctccgtgtcctggatttaagtgaatgctatattacgaagttgccagattgtattggtcagttgaagcagctgaggtttcttcatgctccacgcataaacaatttcgagattcccaattgtatcactgagctctcagaactgaattacctcaaccttagatgctctcgttatatatcagtgctaccggagtcaattggtgatatgaaaggtctgatgcatcttgatttatcagattgctatgaaatatgtgaacttcccgtatcattttcagagctcaagcagctggtgcatctggatttatcaccctgcaatatgttttcagcagaagctttgggtggttgcaccaaacttcagcatctgaatttatcagttgtagttactaacgataagcgcatcacagggctgccagaggtcattggcaatctaattaaactcaggtatttaaatctatcggggtgcgtggacctcatggggcctcggcctccatttggtcagtctcctgattgggtggaggaaattcacaggttgctttgttctatcagtaccctttcaaacctagagcatctggacttgtctaacaatcaggaggtttccagtataccagaaagttttggaaacctcacgaagcttcatacattggacctcagaagatgctacttcctacataagcttcccgatagtatctctaaaatggttagtctgaaggttctaataaattcgtccgttagattgggtgaatccacgctccctcggtttaatttggtctcattgccacactttgaggtgtgtgcttcaagtgataaatgtagtagtaatatcagcctgctacagcctacaaatcctgatgagctgaagatagataaacttgaaaatgtgaagtctgcagaagaggcaagaagtgtaaaactgatagagaaacaagcaatcactagtctaacatttcgatggaccctaggtgctgagaggtttgtggatgacaaggttgtattggaaagcctagtgccaccaagcagtgtatggtttatgagcattactggttacaggagtcacagcattccagattggtttatggatattaggcggtatctccctaatctttcgaggatagaactttctggcattcgtaacggcaataacctactaccaccacttggtcaactaccaaagttacgagacctgattctcgaccgtatggagggcttggaagagtggaacacaacacattacattggtgaggaaggttcaaatgagctcatgtttcctaagcttgaagaattgatgataaggcagtgcgccaagttgaggatgataaaaccgtgtctgcctagagctagatgcttgcgcataggagattctgataatatgctatcatcatggggagagagatcaacacatatcagtgctttctcctcttctccaattactgaattgcttgttgctgaaagcaaggtgcccatgcatcaatggaggttgctttaccacctccctgacctccgtactttaacgatcatggattgcagtgatctgagcacctcacctgacatgacccaacacctgtcctccattgacttacaatgcctcaaattaatttcactcaaccaggcacaactccctaattggttggctaagctgacttcactacagaaactaactctggaacggtgcataagcatgacgtcattaccgcagtggttaggagaagttatctctttcgagaaaattgaggtcaagtacaaccccaaattagaggatgatgccgcctcgttgctaccggagatcactggagcg

SEQ ID NO: 14 - protein, 969 aa, Aegilops sharonensis
MVILPIYGIGGIGKTTLAQLVFNDQQFEDYTRVWVYVSQEFNLNKIGNSIITQLTDKISNISTKQMLHKRLKDLFAGKRILIVLDDLWEENPKEFDKLKVMLGLGMGSKVIIVTTRDGGLARKFCSPAVTPYKLETLTVDECWTIIKHKADFENRVDQEQLEHIGREIAAKCGGVALAAQSLGYMLNGMTSDEWESVRDSYIWNLSSSEGHEVLASLQLSYSHMPDWLKLCFSYCAIFPKGHNIVKYDLIYQWIALGFIKQSRMFDFMQLSKNYVRQLLGMSFLQYSKTPLSDRNQDKDATFFTMHDLVHDLAKEMLSHQLNTGGNKCRYALLTDCSKPLQFTVNFPANIKALRYQDCGGRELCGGAFSSAKCLRVLDLSECYITKLPDCIGQLKQLRFLHAPRINNFEIPNCITELSELNYLNLRCSRYISVLPESIGDMKGLMHLDLSDCYEICELPVSFSELKQLVHLDLSPCNMFSAEALGGCTKLQHLNLSVVVTNDKRITGLPEVIGNLIKLRYLNLSGCVDLMGPRPPFGQSPDWVEEIHRLLCSISTLSNLEHLDLSNNQEVSSIPESFGNLTKLHTLDLRRCYFLHKLPDSISKMVSLKVLINSSVRLGESTLPRFNLVSLPHFEVCASSDKCSSNISLLQPTNPDELKIDKLENVKSAEEARSVKLIEKQAITSLTFRWTLGAERFVDDKVVLESLVPPSSVWFMSITGYRSHSIPDWFMDIRRYLPNLSRIELSGIRNGNNLLPPLGQLPKLRDLILDRMEGLEEWNTTHYIGEEGSNELMFPKLEELMIRQCAKLRMIKPCLPRARCLRIGDSDNMLSSWGERSTHISAFSSSPITELLVAESKVPMHQWRLLYHLPDLRTLTIMDCSDLSTSPDMTQHLSSIDLQCLKLISLNQAQLPNWLAKLTSLQKLTLERCISMTSLPQWLGEVISFEKIEVKYNPKLEDDAASLLPEITGA

SEQ ID NO: 15 - DNA, 2151 bp, Holcus lanatus
  CDS (1)..(2151)
atggcagaagccattgttgggccgctgctgaacaagctgcaggaggtggtggtgacggaggggaaggcgctcgccggcgtaggccgtgagatcgaccgcctccgtgagaagctcatgtggctgcagtcgctggtggacgagaccgatctacgcagccggagtgaccgcaacaagcaaatcctggtgctcgcgtgccagatgcgcgaggtcgccttcgaggccgaggatgccgtcgaccgtttcttcctggaggtcgacctctcccgctttggccgccactggcgcctggcggcccgcctgttcttcgccaacttcgccacgcagctccgcgtccgcttcgtcctctccaggaagatcagctccatgaatgcacggattgaggacatcatcgacaacagcgccaagtacagcagcagcaacgctggaatcagtacggacgccaccacgtggagggcttcccgctctcttcctcccctccgccgtaactgggacgacctaggctttgagaaggccgagacgcctcctgaccatgaggaggccgagacgcctcctgcaaaacgcaacaacaagagagggaaaacccccccaaaaggaaaaacctccccaaaaggaaaaggagaaacctcagcggaggagaagcagacggaagaggaaaaacaagccaaggagggggaagaaatggcaatgcaagcaggcctaaaaaacctcctcctggacaagaaagatgcggacagggggggcagctctgtgatctatgtggttggggagagcggtatggggaaaagatatctgataaagaaagcatacgaagatccagccatagttgacaattttgtccgtgtctgggcgagcttcccaccagacaccagcgacatcccttatcaaataacaagaatgctgaaagaggagtgctccattcggaagatgggcaacaagaaacttttccaagtgaagtacttggtggtgtttgattgcccaatgagcagcgccatgctggggagcatcgttgaaaagttccctacgggcgcaccagggagcaagattgtggtgacagcgacgtccagtccccccaagcaaactgatggcgtcatcaagcttgccaacctcgacaaacagaagagcttcaagctgttcaacgacgtgattgggctgggagggcacaggacgacagcgtacaagacaaagatgataaaacaggtccgcgatcacattgaagagataaccaatggtctgccactggcggtgatccttctagccaagctgatgaggaccatggactacaacaagtgggaggacgcatccgagtacatcaagaacaacaaccaagacgacctgctcaagaccatcgtgtccatgggcatcgatgacctccccgacgagatcaagtcgtgcttgctctacatggcaggcttcccggagcgcagcatcatggatgcggtgcagctcgtgcggctctggatggccgagggcttcctgacacataagcttggggtggaaccggaagagctgggccagcgctacctcaaggagttgatcttccggggccttgtggagctggtggagaaggaggaagacggagaagccgtgaagtcggttaagatccttgatcagattcatcagtttttcaggtgggaggcgcagcgtactggcttcatggaagcccactatggtgggtctgcccctgttccagacagtgctaggcgcttggctctcaacagcagaaatttgccaatgccagacaaaatgaaggtgctgaagaagctgcgaactgtcttgtcccactcgcatgatggtcataataaccatcatgcaaattttcaagtgccattcatggaagtcttccccgagcttctcacgcactccatcttccttcgcgtcatcagcctggaaggtgtcgacattggcgaggagctgcccagacatatcggcaagttgctgcatttacagtaccttggtctccagtgcccgactttgacgacggttcctgacaccatcgctaaactcaaaaggctccagataatggatgtgcgacagaccaaagtgacatctctgcccgactccttctggactatcaaatccctgcgccgtgtcctcgccgacaacaaaaacttctctttccccaaagcttcccaacatctcatggcttcccca

SEQ ID NO: 16 - protein, 717 aa, Holcus lanatus
MAEAIVGPLLNKLQEVVVTEGKALAGVGREIDRLREKLMWLQSLVDETDLRSRSDRNKQILVLACQMREVAFEAEDAVDRFFLEVDLSRFGRHWRLAARLFFANFATQLRVRFVLSRKISSMNARIEDIIDNSAKYSSSNAGISTDATTWRASRSLPPLRRNWDDLGFEKAETPPDHEEAETPPAKRNNKRGKTPPKGKTSPKGKGETSAEEKQTEEEKQAKEGEEMAMQAGLKNLLLDKKDADRGGSSVIYVVGESGMGKRYLIKKAYEDPAIVDNFVRVWASFPPDTSDIPYQITRMLKEECSIRKMGNKKLFQVKYLVVFDCPMSSAMLGSIVEKFPTGAPGSKIVVTATSSPPKQTDGVIKLANLDKQKSFKLFNDVIGLGGHRTTAYKTKMIKQVRDHIEEITNGLPLAVILLAKLMRTMDYNKWEDASEYIKNNNQDDLLKTIVSMGIDDLPDEIKSCLLYMAGFPERSIMDAVQLVRLWMAEGFLTHKLGVEPEELGQRYLKELIFRGLVELVEKEEDGEAVKSVKILDQIHQFFRWEAQRTGFMEAHYGGSAPVPDSARRLALNSRNLPMPDKMKVLKKLRTVLSHSHDGHNNHHANFQVPFMEVFPELLTHSIFLRVISLEGVDIGEELPRHIGKLLHLQYLGLQCPTLTTVPDTIAKLKRLQIMDVRQTKVTSLPDSFWTIKSLRRVLADNKNFSFPKASQHLMASP

SEQ ID NO: 17 - DNA, 2865 bp, Koeleria macrantha
  CDS (1)..(2865)
atgtcggcgcatgcggttgtggatgcctccacgggggtgatgaacaccctcctgtgcaagctctccaagcttctggaggaagagtactcacggctcaaaggcgtgcgccgtcagatcaggttcctcagagacgagctgagcagcatgaaggccgtgctggagacactcgctgacgcagagcagcttgatcctctgaagagaaactggcgggacaaggtgcgcgagctgtcctatgacattgaggattgcattgatgacttcatggatcgcgttggcgatgaccatggtgagctacagacaggcctcaaggggttcttcagcaaactgaagaagctgaaggctcgccacgagatcgccggcgatatacaacaactcaagatccgcacgatcgaggcaagcgagaggcataagaggtatgattttcttgagccgacatcaagatccagcacttctgccattgaccctcgtctgccagcgctctatgaggacgtggacagacttgtgggcatcgatggcccgaaggagcatgtcattggctggttttgcaaggagaaagagcatgtagatctcaaggtgttaccaattgttggttctggaggtcttgggaagactactttggcaaaccaagtgtactgccaattaaaaggccaatttcaatgcacggcttttgtctcggtgtcccgaaatccaaacatacagaacattttaaggcaaatgcttattgaagtaggcatcagcagtggtacacaggatgatgaacgacaactcatcgataggataagagactatctcaaagataaaaggtacttggttgtaattgatgatgtatgggacatcgaagcatggaaagctatcaggcttgctttgtacaataatagatgtggtagcaggattatcaccactactcgtaatgttgccatcgcatcatattgctcatgtgatagcagttatgtttatcaaatggaatcccttaattttaatgactccaaaaggctctttttcagaagagtatttggttctgaagaagtaagctactctcacctggaagaagtttctaacgagatattggcaaaatgtggtggactaccattggcgattattacgttatccagtttattagctgataagtatgcaaaagatgaatggaacagggtgctaacagctattggttcggcccttgctactgatcctaatgtcgggaacatgataaagatattatctctgagttattttgatcttcctcaccatatgagaacttgtttgttgtatctgagtgtattcccagaagatcataggattgacaaacagcatttggtaagtagatgggtcgcagaaggattcatccatgaagaacaagggcgaagtgcttatgaagtaggcgagggttattttaatgacctcatcaacagaagcttgcttcaaccagtggatgtagagtatggccagccgaaggcatgccgagttcatgacatcatccttgatttcatcacatgcaaggctgccgaagaaaattttgtgacttcctttgattccgtggtgcaggaacatgcatcagattacagagttcgtcggttttgtgttgagaatcgcaacataaagaaggttaccctatcaacaaacctgatactgtcccatgttcgatcacttactgtatttggacactgcatgcaagaatctttgttgacattccccacccttcgtgtgttggacctgggagaatgttgggagttagaaaaccatcatcttgcaaatattgaaaatttgtgtcatctgaagtacttgcgtctcggacaatctagaattactgagctccccagaaaaattggagaactgcagtatttagaaacactggacataaaaggtacaaggattcaagaactgccatcaactatagctagacttcaacgattggcacatttacatgttgatcacatggttaggtttccggagggaataattgcacagatgcaaaacttagaagaggtagagaatttcggggtcttctccaatgaacaagggaagtctctgcgagaattcagtcggctaagtaagctgaggacgttgaaagtatcaaacggttggtcaagagacacaaccaaaaggagccatcttgaggtggtcaagagttatttgggaactttgttatcttcttgcaacctttatcatctctatttccttgacagttatgatggggctagccctccagcctatcgttacccagtgtcactagaaccttggtgccctactactacttgtacccttaggaagctgcacatcacatactgttacatcaacaaggttccaaactggatgagcctgcttgaaaatctcagggaattaaacctttctatcttcagtatgagatcagaagatgttgtgattcttggagcaataccatctttgctttttcttgagctgaggactttcttcggcactgatggaaggatcttggttgctgggttcagaagtttgaagtatttcaacctagaaatcttctgctgcgggacctctctggagtttgaagcagggtcattgccaaatgttgagcacctcaagcttgaactccgtctgcacaagatggaatgcctgaacggtgcttctgatttcggtatccagcacctctccgccctcaccaaggttgagatcagtatttatggtgacaccgatggtctctacgatctatctgaagacatcatcgtcaaatgtgttgcaaaccacctcgaaaccgccatgaagaagcttccgaaccatcccactctctcgttcatcccgggcggattatcaccgtgtctgcattttggaaagttcattgaatcctacaatcgaaggtatggagagccaacagggtttggaagcagtgaaatt

SEQ ID NO: 18 - protein, 955 aa, Koeleria macrantha
MSAHAVVDASTGVMNTLLCKLSKLLEEEYSRLKGVRRQIRFLRDELSSMKAVLETLADAEQLDPLKRNWRDKVRELSYDIEDCIDDFMDRVGDDHGELQTGLKGFFSKLKKLKARHEIAGDIQQLKIRTIEASERHKRYDFLEPTSRSSTSAIDPRLPALYEDVDRLVGIDGPKEHVIGWFCKEKEHVDLKVLPIVGSGGLGKTTLANQVYCQLKGQFQCTAFVSVSRNPNIQNILRQMLIEVGISSGTQDDERQLIDRIRDYLKDKRYLVVIDDVWDIEAWKAIRLALYNNRCGSRIITTTRNVAIASYCSCDSSYVYQMESLNFNDSKRLFFRRVFGSEEVSYSHLEEVSNEILAKCGGLPLAIITLSSLLADKYAKDEWNRVLTAIGSALATDPNVGNMIKILSLSYFDLPHHMRTCLLYLSVFPEDHRIDKQHLVSRWVAEGFIHEEQGRSAYEVGEGYFNDLINRSLLQPVDVEYGQPKACRVHDIILDFITCKAAEENFVTSFDSVVQEHASDYRVRRFCVENRNIKKVTLSTNLILSHVRSLTVFGHCMQESLLTFPTLRVLDLGECWELENHHLANIENLCHLKYLRLGQSRITELPRKIGELQYLETLDIKGTRIQELPSTIARLQRLAHLHVDHMVRFPEGIIAQMQNLEEVENFGVFSNEQGKSLREFSRLSKLRTLKVSNGWSRDTTKRSHLEVVKSYLGTLLSSCNLYHLYFLDSYDGASPPAYRYPVSLEPWCPTTTCTLRKLHITYCYINKVPNWMSLLENLRELNLSIFSMRSEDVVILGAIPSLLFLELRTFFGTDGRILVAGFRSLKYFNLEIFCCGTSLEFEAGSLPNVEHLKLELRLHKMECLNGASDFGIQHLSALTKVEISIYGDTDGLYDLSEDIIVKCVANHLETAMKKLPNHPTLSFIPGGLSPCLHFGKFIESYNRRYGEPTGFGSSEI

SEQ ID NO: 19 - DNA, 2727 bp, Koeleria macrantha
  CDS (1)..(2727)
atggcggaggccgtcattgggtcggtggtggggaagctgcaggagctggcgatgagtgaggcccgggcgatggtggcggtgaacgargacatacggagcctccgggacaagctcatgtggatgcaggccttcgtgcgcgacgccgagccgcggcggcgcgtacagaacgacgagcgcatcagggtgtggctgcaacagacccgcagcgcggtcttcgactccgaggacgccgttgaccagtatttcctccaggtcgacctctccaggtacccaagctggacccatgctaccctcaagttctttgccggtttcaccactcaagtacgtgtgcgccgtgacctttctaacaagatcaaatcaatcaatacaagactaggggacatcatcgcaagcaaggacatgtacaaaatggacgatgcacctggtgtcccagctgagacctggagaccatctgctgccatccataccagcaccgagaacatggatagtttggcgctgccattggtgggacgagatacgcagctagaagttctgaagaaatatttggaggcaaaaactaaggaagcaaaaccagaagtgatctatgtgatagggaagagtggtgtgggcaagacaaagcttgtgaggaagatgtacatggagaactggacatgggatcactttgataagcaggcctgggtgagctttgcacccaatctaagtgcctccaacatcctgaagttgatcattcagcgtctggacgaagagaatgttacatactccggagacaaggtccgtcagaaactggaggagctgctacaagaaagcaagtacttgttggttatagatggtgaagtgagcagcacagagtggaaacgcatactacatgaccttcccaacggcaaggatgggagcagggtagtgcagatcacacagaccaaaccagctgaatcctcacctgccaccttgaaatgcattgtacttgaggatctcaatgaacatgacgccaccaacctgttcctagaaacactattcacggaggatcaaggtgaaaagtaccggaaagttgtgaagaaggctgtcaaagaggaacactatggagaagacatcatctacgagattacaggtggtttgccacttgcagttgtgcttctatcaggccttttaagaaccaaggagcaccctggagaatggaagaaagtgtttgactacctcaaggcccactccgttcaatggaggcgcctcgacaccgtattatccatgtgctttgatgaccttccacatgatctgaaatcttgcttcctgtactttgctgtcttgccagtgaacacacttatcagggcacgtagcttagtgtgcatgtggatggcggagggatttctgaggccaaaagatggccagaaaatggagaaggtgggcgaacactacttgaaagagctagtcgcaaggcggctggtaaaccttgcaccaatggagtatgaagcttctggagatgagcgtgttgctgtccaaagcaaagtccatgccttcttgcttcatgaggcgcaagaggcaagcttcgtggaggtccatagtggagatgacatccctatattgtccaatgcacgccgcctttccctccagaatcatagggacaagtatgctgctctcgacaaccctctgcccaagctgaggtctatcttgtcaaactttgaaaaagtggaggctagcaaggaagaagaagacctgggcaccacggacaaggaagaagagaaggaaaaccaagcatgccattgtctccattactcgagacatacagccgactccaaggagcgcatggccatacaaaagctcctgcaaggatctgagttccttcgtgtcatcaacctgcatggccttgagattggagacaagctaccatctgatattgggagtgtggtgcacttggaatacctcggcatcacctcctgctctttggagcacataccaccatcaattggaaagctcactggcctccaaacactagatgttcgagacaccaacgtcaggacactccccggtgagttctggaagattaagaagctgcggcatgtatttggcttccttgtccttcctaggcgagtcggacacctaagtcagttgcagactctggagagcatagagcctgacaaagatcatggctgggataaaaaaaccatagacaagatgttacaccttcagtccttgtacatatggaagctacctaaaaaaaatgccgatgccttggatgctgtctgcaaactcaagtacctcacgctcctgagcatacaaggtgaaaacattatctcaaatttgttcactgattccaagcttccgcgactccaggaaatgagactaaaggggctgattgtgtcgccaataaatgggagttccagcagcagtggctttcatcttccaaacctgacaaagctatctttggagaagacaaaggtgaggaaagacttcatcaagaagctaggaaaactgccctttcttgcaactcttgccctaaaccaagaatcctacatagacgaagatgaacatcttgtattcagttgtgggttccaaagtctcaaggaattggtgctacatgtgatggtgaagaagatcgaaataggggattcagtatttcctcagcttaaggatctgaaggttttcacctactcaaatgatatttgtgccgtcattcatggtaacagacctcacatactagacctaatcaagaaaaatgatgttcgcttgtgtgatgaa

SEQ ID NO: 20 - protein, 909 aa, Koeleria macrantha
MAEAVIGSVVGKLQELAMSEARAMVAVNEDIRSLRDKLMWMQAFVRDAEPRRRVQNDERIRVWLQQTRSAVFDSEDAVDQYFLQVDLSRYPSWTHATLKFFAGFTTQVRVRRDLSNKIKSINTRLGDIIASKDMYKMDDAPGVPAETWRPSAAIHTSTENMDSLALPLVGRDTQLEVLKKYLEAKTKEAKPEVIYVIGKSGVGKTKLVRKMYMENWTWDHFDKQAWVSFAPNLSASNILKLIIQRLDEENVTYSGDKVRQKLEELLQESKYLLVIDGEVSSTEWKRILHDLPNGKDGSRVVQITQTKPAESSPATLKCIVLEDLNEHDATNLFLETLFTEDQGEKYRKVVKKAVKEEHYGEDIIYEITGGLPLAVVLLSGLLRTKEHPGEWKKVFDYLKAHSVQWRRLDTVLSMCFDDLPHDLKSCFLYFAVLPVNTLIRARSLVCMWMAEGFLRPKDGQKMEKVGEHYLKELVARRLVNLAPMEYEASGDERVAVQSKVHAFLLHEAQEASFVEVHSGDDIPILSNARRLSLQNHRDKYAALDNPLPKLRSILSNFEKVEASKEEEDLGTTDKEEEKENQACHCLHYSRHTADSKERMAIQKLLQGSEFLRVINLHGLEIGDKLPSDIGSVVHLEYLGITSCSLEHIPPSIGKLTGLQTLDVRDTNVRTLPGEFWKIKKLRHVFGFLVLPRRVGHLSQLQTLESIEPDKDHGWDKKTIDKMLHLQSLYIWKLPKKNADALDAVCKLKYLTLLSIQGENIISNLFTDSKLPRLQEMRLKGLIVSPINGSSSSSGFHLPNLTKLSLEKTKVRKDFIKKLGKLPFLATLALNQESYIDEDEHLVFSCGFQSLKELVLHVMVKKIEIGDSVFPQLKDLKVFTYSNDICAVIHGNRPHILDLIKKNDVRLCDE

SEQ ID NO: 21 - DNA, 2049 bp, Koeleria macrantha
  CDS (1)..(2049)
atggacaagatccgagaattcctccaagacagaaggtactttatcataattgatgatatatgggaattaggaacatgggaaactttgaaatgtgcatttgtcaagaatacatgtggcagcagaataatgatcacaacacgtatagttgatgttgccaagtcctgttctccttccaatgaagatcttgtctatgagatgaaaccacttagtgaggctgactcgaagaagttatttttcaagaggatatttggttgtgaagaaagctgccctgatagcttaaaagaagcttccaaagatattttgaaaaaatgccgtggtttacctctggccatcaatgccatttctagcttattggccacaacaagggaaacaaaagaagagtgggatcgggtgcgccattcaattcgctcttcaaaggccaaaagtgatataatagaaaccatgaattacatattatctcttagttactttgatcttccccaccacctaagaagctgtatattgtacttggccctgtttcctgaagacaaattgattgaaaggcagcggttggtacgcagatggatttctgaaggctttattcatggaaaaagtggagaagatctcatggaattaggagagggatattttcatgagcttgtgaacagaagtctcatacagcctgaatacatagggtatgacggcaaggcgcagtattgccgagtccatgacaccatcctcgatttcctcattgacaagtcctctgaacagaatttgtgtactgtcctaaaaaacaagtgcaagcctgatggcatagttcgtcggatctctcttatgggaactgaggatgaagaaatcatagagcaattggatttgtcacaagctcggtcaatcagtgcttttgggtatatcgaacaattgcctttgcttgggaagtcaaaatccctgcgcgtgctagacttgcgaaactgcagtaagttgaaaaatcatcatatcaaggatattgagagactctatcagctgagatacttggatatctctgatacagggatcactgagttacctaggcaaattggggagctactgtatctagagacgctagttacaccctattatttacgtgagcttccagaaagcacaactcggctacggcgattgtcacgtttgtttgttgaccctcgctgtaagcttccaggtgggtttggaaacttggtaaacttgcaagagcttggcaatatcgacgccttgcagttcaagcatgtggaagagctcggcaaacttacaaatctgagaaagctgacgattaatttgcacactagagggatagatggtaacaaattaggacagtccaaggaaaagctggtgtcctcgctctgtaaactggacgaaggcggcctctgttctctgaggatttattacaacaacttgagagaaatggatggagtagagccgttcctccctgctttgggttgcatccatgaggttatcgtagatgcagaagatatatgcccaattagcagatggctcatgtcacttcccaatctacaccggttggttttccattgtctggaaaaggtagagcagcaggatatcgagatgattggattgatacccaatcttctcgaattgtcattgtctctctctcaaacagacaatgcacgccagctaatcatcaggtgtgaaggatttcaacagttgcagagttttgatgtttggggtactcgtatgggagttttaatgtttgaaccgggggctatgccgaggctgaagaatcttgagctccagagatttcgtgaaaagcccgaatctgctgtggtcggtttcgactttggcatccaacacctctccagccttgagcgcctcactgttcacctattctgcaatggctcggctgcagaaataaaggctgtggaggatgctttcgagagcatggccgaggcaaaccccaaccatccaacactagagatgacaagacgaattccgcatcatatgggacaagacgagcaaatagatatggcaggctcaggtacaacgccagaaatagaagaagtctgcgaagtcctggatgcc

SEQ ID NO: 22 - protein, 683 aa, Koeleria macrantha
MDKIREFLQDRRYFIIIDDIWELGTWETLKCAFVKNTCGSRIMITTRIVDVAKSCSPSNEDLVYEMKPLSEADSKKLFFKRIFGCEESCPDSLKEASKDILKKCRGLPLAINAISSLLATTRETKEEWDRVRHSIRSSKAKSDIIETMNYILSLSYFDLPHHLRSCILYLALFPEDKLIERQRLVRRWISEGFIHGKSGEDLMELGEGYFHELVNRSLIQPEYIGYDGKAQYCRVHDTILDFLIDKSSEQNLCTVLKNKCKPDGIVRRISLMGTEDEEIIEQLDLSQARSISAFGYIEQLPLLGKSKSLRVLDLRNCSKLKNHHIKDIERLYQLRYLDISDTGITELPRQIGELLYLETLVTPYYLRELPESTTRLRRLSRLFVDPRCKLPGGFGNLVNLQELGNIDALQFKHVEELGKLTNLRKLTINLHTRGIDGNKLGQSKEKLVSSLCKLDEGGLCSLRIYYNNLREMDGVEPFLPALGCIHEVIVDAEDICPISRWLMSLPNLHRLVFHCLEKVEQQDIEMIGLIPNLLELSLSLSQTDNARQLIIRCEGFQQLQSFDVWGTRMGVLMFEPGAMPRLKNLELQRFREKPESAVVGFDFGIQHLSSLERLTVHLFCNGSAAEIKAVEDAFESMAEANPNHPTLEMTRRIPHHMGQDEQIDMAGSGTTPEIEEVCEVLDA

SEQ ID NO: 23 - DNA, 2151 bp, Koeleria macrantha
  CDS (1)..(2151)
atggatctgtacttgacggcgacgtccctcgtctctgacgcgaacaattggttcgatttcctcagcacgaccttctccgcggtctccgacctgctatcccggtggaggcataagcaggagcggcggcatggcgaggcggagaggaggcagctcaagtggaaggaggaggatgtgaagatgaagcagctccactactgcttgctggatttgccggatctgatcaaccatgccgagtggctcagctacataaaagacgacaaagaggtggccaagctcctccccgagctcaagggtcgagtgaatgatgcatacgacctgctcgaagagttcagttatcaccatcagctacaatcagagcagccgggggacagtttcttgaagaacatcaccgatggtaaccatgtgcgggagatcctggacgatctgaattatctgagaaacacaatggggggaatcatcgatcgtcgtactcgtgcagagccgcagcagtttggcaagttgctaaggccggccatgagctctttctgcgacaagtccaaggtccgcacacttcacaaagaagtggataaggtgctcgagctgctggaggtggaaacctgctttccggggactcgcaaacggcgcatcagcgggaaatctactacaatcagcaaaagggccagtagaactgacactatcccttgtagtacatccgcaagtgtacaatgcaccagtgaagaaactagtacaactgtattagcaatatctggcattgggggtgtgggaaaaactacattggcccggcaagttttcaatgatgagagaaccaaggggaattttgatctgagaatttggatatctgtctcggatgacttcaacgtcaagagattaactaaggagttcatacagtctgctctagaaaatttgatgcaatctgataatttgtgtagccttcagcatactctcaccgaaaggattatcaaattgaagttcttacttgttctcgatgatgtgtgggacgacgtatataccaatcaagacaacagatggcatgattttcttgaaccattaaagtctgcccaacaaggaagtgccattctgttgacgacaagatctcaaagggttgcagatctagtgaatgggagcatgcacttccatctagaggggcttccgactacagttttcgatgagttctttcaggcatgtgcatttggcatagaccattgtatagttaatccagaactgaaccccattggcaaaaggataattccacagctgaaaagatgtccattagctgctgaaactcttggacgtatactgaagcctctgctggaaagagagcattgggattgggtcgcagggagagagctgtgggagctgaaacaagagaaatatgacattctgccagtccttcgtttgagctatctgtatctaccctcccatctgagaagctgctttttgttttgctccatgtatccaaaaggttacagatttgacaaagatactcttgtgaacacttggatagcagctggtttaattgagtcctgcaagggcggcaagctagaaagcgatggtcatcaatattttggggatttgctgcatcggtcccttctgcatatagatgcaagcagcccaacatcctccatgtatgtcgtccatgagttgatgcatgatatggcgaagctagtttctgaggatgagtgcttcgtcgtgaaaggcgaaacagatttgcaaaagatccctgaagatgttcggcacctgtcaataatcggtggcaatggtctcaacgaaaccaacttacgagtgctgtgcaagtacaagaagctgcgttccattgtatgccatggccttgactctgagataattactcctgcagctaagtgctggtttgaggtgctcaccaaaatacgaatgctgggttttttgtcttgcaagttaaattatctgcctgagacgatcgggaatctaaagcttctacagtacctcaatattggtgaatgtactttcgaagagcttcctccctctttttggcaactccagagtttacgaattgtagatgctcagaaatgtcgtatgcaacacattcctgaagaattcaaccagctaagaggtaaattgcaaagatttaagttgaggggaacaattatcagtgaacctggcaattatgcgctt

SEQ ID NO: 24 - protein, 717 aa, Koeleria macrantha
MDLYLTATSLVSDANNWFDFLSTTFSAVSDLLSRWRHKQERRHGEAERRQLKWKEEDVKMKQLHYCLLDLPDLINHAEWLSYIKDDKEVAKLLPELKGRVNDAYDLLEEFSYHHQLQSEQPGDSFLKNITDGNHVREILDDLNYLRNTMGGIIDRRTRAEPQQFGKLLRPAMSSFCDKSKVRTLHKEVDKVLELLEVETCFPGTRKRRISGKSTTISKRASRTDTIPCSTSASVQCTSEETSTTVLAISGIGGVGKTTLARQVFNDERTKGNFDLRIWISVSDDFNVKRLTKEFIQSALENLMQSDNLCSLQHTLTERIIKLKFLLVLDDVWDDVYTNQDNRWHDFLEPLKSAQQGSAILLTTRSQRVADLVNGSMHFHLEGLPTTVFDEFFQACAFGIDHCIVNPELNPIGKRIIPQLKRCPLAAETLGRILKPLLEREHWDWVAGRELWELKQEKYDILPVLRLSYLYLPSHLRSCFLFCSMYPKGYRFDKDTLVNTWIAAGLIESCKGGKLESDGHQYFGDLLHRSLLHIDASSPTSSMYVVHELMHDMAKLVSEDECFVVKGETDLQKIPEDVRHLSIIGGNGLNETNLRVLCKYKKLRSIVCHGLDSEIITPAAKCWFEVLTKIRMLGFLSCKLNYLPETIGNLKLLQYLNIGECTFEELPPSFWQLQSLRIVDAQKCRMQHIPEEFNQLRGKLQRFKLRGTIISEPGNYAL

SEQ ID NO: 25 - DNA, 4530 bp, Aegilops sharonensis
  CDS (1)..(4530)
atgagcggggttggggagatgatcgcgagtgccgtggtgaagcaaatcactagcaggctaatcaaactcctcgaagatgagaccactatgcagtggaagtttaaaggcgaggtggataaaatggcagagaaaatgaaatatctggcagctgtgatgcatgatgctgatgataaagtgcgccgaggaggaagggttggagaaacagttgggctatggctcctgaaattgaaatccatctcccacgacgttgaggacctgctggacgacttggacactaagaataacgaagcaaagctcaaggtattcttttcggggaacaatcaagcttaccggtggataactaggccccatcgtttgaaggacgtggggaagagaatagaagaaataaaaaaggagggctgcgagttcaatctggatcctaaagcacaagtcgaacaaagacaagaagagacttatgcaaccatcagcgcgacaactggaatgcaagggaggagcgctgaaaaagaaaaattaataaatttgatattgcgaagccaagctaatgagcgtatctccataattccaattgttggccttggtggtatagggaagacaacattggctcggtcagtttgggcagatgagaaattcaacatcttcgacatcaaagcctgggttcatgtgtctgacaagtttgatttgcataaaattgcgagaaccatcatcagaagcgtagataccgatatcaatcttgatagcaatgatttgcattttctgcagaatattcttcgagtcaaacttgctggtaaaaagtacttgatttttttggatgatatctgggaagaagatggagataagctggacaagctgaaggacatgctacagcatggctccaacggtagcaggattataattactacacgtaaccaaaggatagtggaaacaatgagcaccggcattcttgcacatgagagggtaattctcccggtgcatgagtctgacagaatcaaattgggtgttctgccaaccgatgactgctgggaattaatgaagataagggcatttggtcctgatgatgaccagactcctttgaaacaaatcgggtatgaaattgcaagtaaatgtgggggtataccactcgtggcaaatgctttcgggaaagtaatgtcagggaataagtccatcgcagcatggcagtatataaaagataggatggttgatttgggtttgagagacgaagatcaaaaagacacattagagtctctcaagttgagttattacttcatgaagctggagttcaaaatttgtttctcgtatttggcggcatttcccaagggcttcattatagacaccaaccgtttaatccagcaatggaatgcacttggatacatttattcagaacatgatggtaaaaactgcatcgactaccttcttgggatgtcctttcttcagatttcaggaccttcttcggctagtcaaagtccagcgtgtgccaatgcatctggggagcttaccatgcatgatctggtacatgatcttgcgttagtaattactgttgatgaattccttgttttggatgctgatgctactggaccaaggacttggaaaaaagctattcactgccgacatgcagagttgatacaatacaagaatcaatccaatgttttcgagcatctgccgaaaaagcttagatccctccatattagagattcactgaaatggaaactccctccaaaggccttttctcgatgcaagtacatgcgtgtcttggacctagcatgtttagtagggcaactctctgaagggcaatcaacgtcaagcaacatgaggctgccacgttccataaacaaaatgaagctacttaggtaccttgatgccacgggattgccagtttcttcactttctaagtctttgcatatacttcaaaatatggaaactctgataatgtccaattgctcacttgaaaccttgcctgacaatgtttgtagcctccacaaacttagctatcttgatctgtccggtaatagaagccttaataagctacctacgtcgttgggtaagctctctaagctctctttcctcaacttatcagggtgttccgtcctccaaggggtgcctaaatccatttgccagttgacatgtttacaatacctagacatgtcagagtgtcgtgccgttcaaaatcttcctgataagtttggtagcctaccaaatatctcattcctaaatttgtccggttgctcaaaattaaccaaactacctgacattgttaaccttgagtctttggagcatttcgacctatcaagttgccacgagctaaaagacctcccacaagattttggtaatcttcaaaatcttgtgttcttgagcctctctgattgctacaaggtttcagtgctcccggaatcattttgccagcttattcatttgaaatacctagatctttcagattgccatggcctcagggaactcccagagtgttttggtaacctttctgagcttgactcattgaacctaataagttgttccaagctgcaagtactgcctgactcattctgtagcttgtttaagctgaggcatctcaatttgtcatactgtatgaggcttgaaaagctcccatcctcgttaggtgaccttaagcttcggttattggacatctctgctgcaactttccatgatttaccggatagcatccgtggcatgactacactcactaaacttgtggtctcgacagcacaactaggggttcataacaaggttcgtgacattcggcagcatctgaatttgccaggggagatagtacatactgtacatctgactgaaaacaaaggatgtagcagtattgtagagttagcacaattgacctgtcaaaacttgaaagtcttacaacttcagaatgtcaggcatccggaagatgcagagagagccaagttacgtgataaatcagatcttcgggttctatggctttgttggggactccagcgagaagaggatatttatgtgctggagaggcttgtacctccacgcaatcttgaacattttacgctagatgggtatatgagcaaggatttccctaactggatttctcacatctccacataccttccttatctcacctttctcaccctttgcaatttaggagcatgtgataatcttccaccatttgggcaactgccaaatttaagatgtctagagatgaattatattcctaacatcacaaaaattggcaaggaattctatggagaaggtggaacctgtaggaaattaagaagtatacaattgaagtcaatggagaatttggtggaatggtggactgcactctcaggtgagaaaaatgaagagtcactgatccctaatttgcattgtttgtcaataaggaactgccccaagttgaagttcctaccatatcccccgaggagtatgttttggcacttggataatagcagcatggtttcgccaaaagagggatttggaaagctttcttcttacgcttttccttttctcatggtagtaagaaactgcaactttgctccagacaaatgggattggcttcaacacctccccacccttgagatattttatgttgagagcatcaatggcttgagggcattgccagaggccatgcaatgtttaaactctctcacaagactaaatttgtggtcattaaaggacctggagaaactgccagaatggttgggggacctcacttctctagaatacattcacatcaaagattgtcccatggtgacatctttgcctgtaagaatgaagtgtcttgctgctcttagagaactttgcctggcggagtgcagaggcctagaagtattgccagaatggctgggacatctgacttccctacaagagttctatatcatgagttgccccaacctgacttccttgcctgaaagcatgaagtgtcttactgctctcagagtacttcggctgatggagtgcgaaggcctagaagtattgccagaatggctgggacatctcacttccctacaagagttctatatcatccgttgccccaacctgacttctttgcctaaaagcatgaagtgtcttactgctctcagagtactttggctgacggagtgcgaaggcctagaagtattcccagaatggctaggacatctcatttccctacaagagttttacatcacctgttgctccaacctgacttgtttgcctgtaagcatgaagcgtcttactgctctgagattactctggttgggccagtgtgaaggtctagacgtattgccagaatggttgggacagctcatctcccttcaagaatttaacatcgtcggttgcccgaacttgacacattttcctgaaagcacacggaaccttaccgccttgaagaaactgaatatttggggatgtccgagtcttgttgagaggtgccaaggggaggatgctgacctgatttctcatatcccggaagtcttgttagaaggaaaaactagagaattgtggtcgacttccggagatgctgaagcatcgacttccggagcatcgactgctgaagaagctggaccatcgacttct

SEQ ID NO: 26 - protein, 1510 aa, Aegilops sharonensis
MSGVGEMIASAVVKQITSRLIKLLEDETTMQWKFKGEVDKMAEKMKYLAAVMHDADDKVRRGGRVGETVGLWLLKLKSISHDVEDLLDDLDTKNNEAKLKVFFSGNNQAYRWITRPHRLKDVGKRIEEIKKEGCEFNLDPKAQVEQRQEETYATISATTGMQGRSAEKEKLINLILRSQANERISIIPIVGLGGIGKTTLARSVWADEKFNIFDIKAWVHVSDKFDLHKIARTIIRSVDTDINLDSNDLHFLQNILRVKLAGKKYLIFLDDIWEEDGDKLDKLKDMLQHGSNGSRIIITTRNQRIVETMSTGILAHERVILPVHESDRIKLGVLPTDDCWELMKIRAFGPDDDQTPLKQIGYEIASKCGGIPLVANAFGKVMSGNKSIAAWQYIKDRMVDLGLRDEDQKDTLESLKLSYYFMKLEFKICFSYLAAFPKGFIIDTNRLIQQWNALGYIYSEHDGKNCIDYLLGMSFLQISGPSSASQSPACANASGELTMHDLVHDLALVITVDEFLVLDADATGPRTWKKAIHCRHAELIQYKNQSNVFEHLPKKLRSLHIRDSLKWKLPPKAFSRCKYMRVLDLACLVGQLSEGQSTSSNMRLPRSINKMKLLRYLDATGLPVSSLSKSLHILQNMETLIMSNCSLETLPDNVCSLHKLSYLDLSGNRSLNKLPTSLGKLSKLSFLNLSGCSVLQGVPKSICQLTCLQYLDMSECRAVQNLPDKFGSLPNISFLNLSGCSKLTKLPDIVNLESLEHFDLSSCHELKDLPQDFGNLQNLVFLSLSDCYKVSVLPESFCQLIHLKYLDLSDCHGLRELPECFGNLSELDSLNLISCSKLQVLPDSFCSLFKLRHLNLSYCMRLEKLPSSLGDLKLRLLDISAATFHDLPDSIRGMTTLTKLVVSTAQLGVHNKVRDIRQHLNLPGEIVHTVHLTENKGCSSIVELAQLTCQNLKVLQLQNVRHPEDAERAKLRDKSDLRVLWLCWGLQREEDIYVLERLVPPRNLEHFTLDGYMSKDFPNWISHISTYLPYLTFLTLCNLGACDNLPPFGQLPNLRCLEMNYIPNITKIGKEFYGEGGTCRKLRSIQLKSMENLVEWWTALSGEKNEESLIPNLHCLSIRNCPKLKFLPYPPRSMFWHLDNSSMVSPKEGFGKLSSYAFPFLMVVRNCNFAPDKWDWLQHLPTLEIFYVESINGLRALPEAMQCLNSLTRLNLWSLKDLEKLPEWLGDLTSLEYIHIKDCPMVTSLPVRMKCLAALRELCLAECRGLEVLPEWLGHLTSLQEFYIMSCPNLTSLPESMKCLTALRVLRLMECEGLEVLPEWLGHLTSLQEFYIIRCPNLTSLPKSMKCLTALRVLWLTECEGLEVFPEWLGHLISLQEFYITCCSNLTCLPVSMKRLTALRLLWLGQCEGLDVLPEWLGQLISLQEFNIVGCPNLTHFPESTRNLTALKKLNIWGCPSLVERCQGEDADLISHIPEVLLEGKTRELWSTSGDAEASTSGASTAEEAGPSTS

SEQ ID NO: 27 - DNA, 29 bp, Artificial sequence
  Apdator sequence
ggggacaagtttgtacaaaaaagcaggct

SEQ ID NO: 28 - DNA, 29 bp, Artificial sequence
  Adaptor sequence
ggggaccactttgtacaagaaagctgggt

SEQ ID NO: 29 - DNA, 3030 bp, Aegilops sharonensis
  CDS (1)..(3030)
atgagcctcctcatgggcgtgcgtaaggatatctggttcatcaaagacgagctagcaacgatgcaggctttcctggtggccgctgaagcaatgaaagagaaagacatgctactgaaggtgtgggcagagcaagtaagggacctatcatacaatattgaagattgtcttagtgaattcatggtgcatgtggcaagtcaaagtttgtcgaggaagctgatgaagcttaaagatcgccatcgaatcgcaatacaaattcgcgatctcaaatcaagggttgaagaagtgagcaacaggaacacacgatacaacctgattgagaagaaccaatttgctagagcagcagatgagagggattcttacatggaagatattcgcaaccagtcagcgagcaacattgatgaagctgaacttgtggggttttccgaacccaaacaaaagttaatagatcatctacatgtccatgccaacaatggccctcctcgggttgtatgtgtggtcggcatgggtggtttgggtaagactactcttacaaggaaggtttatgaaagtatgaaaagcttttcatgttgtgcttggattattgtctctcagtcatttgtcaggacggagtttctcaaagttatgatcaaagaactttttggcagtgatgcattgaagaagcaacttgaagagaatgttgggagcgaagtgaatctcgccaactatcttcagagagagctacctaggcagaggtattttgttgttcttgatgatttgtggaacatagatgattggaattggatgagaagtgttgtttttcctagtagtaacaacaaaggtagccggatagtggtaacaacacgagatcttggcttagctaagaagtgcactttggaatcttctagtccacttatctaccgccatgaacccctgaaaacaaatgatgccataaatctgctactaaggaagactaggaaaagtgaggaagaaatgaaaaaagatggaaacatgaggaaaatagttactaagatagtcaaaaagtctggaaagttacccctagctatactcacaataggaggcatgcttgccactagaatggttaacgagtgggaaagtatttatgaccagctcccctcagagctagggagaaatggtagccttgaagcgatgaggaggatggttactctgagttacaaccacttgccttctcatcttaagtcatgttttttatatttaagcatatttcctgaggattttgaaatcaaaaggaggcgggtagtggaaagatggatagccgaggggtttattattgccaggagcggggtgagtttagaggatgttgggaattgttactttattgacctaattaaccgaagcttgattcaggcagcaagagtgaacatacatggaattgtcaagagttgccgagttcatgatattgttcgggatgttatgatctcaatttctagagatgaaaaatttgcatggtctacattggataatgaaaccagcatagcaggggataacttccgtcatatagcactgcaaggcagttggtgcccaaataaaggctttgactggaaccatgtccggtcgttgactatgtttgatgagagacccatgaagccgacaccttcactatgttcgcccgactttaggatgcttagagtcttggatctgtatgatgtccattttgtaatcaatcaaaaagatatcaacaccatagggtcgttacgtcatttgaaatatgtccatgttgctggaagaggaaattatatttacaagctcccaagaaccataggaaaactacaaggcttgcagactttggacatgagagggtgtaaagtcgcatcactaccaattgagatcactaaactagaaagccttcgtagcctccgctgcagcaaaactactttagatggtttggtttaccctaagatctggttactgtacacattctgtacgcctattctgtccactcctttagttagtccggatgagcgtcacattatgatgtccattcagatgacctggactggtcgtttctccaactctccaggtgtgagggtgcccaaagggatcagcaaactaaaggagttagagatactagagattgtggatattgaacggacaagtaggaaagcagttaaagagctcggggagcttataaagctcagaaagttgagcgtcggtgtaggggcaagcaagcaaaagagcaaaatactctctacatcccttgagaagctcacttccctccgctctctgtgtctccgtgtggataaaaatccatctgggagaagcggtgcatcactcaagtggctgttgcagtctgtttcctcacctccccctctcctgaggaagctgactttgcgtggagatctcggggagttccctgactggtttggggatctggtacatttggtgaagattggcttacggtctagcaatctgaaggatggggatgaaagcatgaaactactgggcgcactgcccaagctgatgctccttcgtcttgattggggttcttatgttggggagaaactggttttcatagcagaaacattcccaagtctcaggagacttgatatttggggcctaacgcaactgacagagttggtattcgaggtgggcacctcgccccagttggaaaagatacaaattagtgtgtgcaggttggaatccgggattactggcatcaaacaccttccaagaatcaaggagatttttctttattacggcggtcaagtggcaaagcttggtgcgctgcaaggtgaggtgaatgcacaccccaaccgtcccgttctgcgactgcaggagaaccggaggcaccacgacctgggtgacgtcgccgaaggctccacatcagcagtacaagtggaggaagcaagaggggtgggggaggaatcatctctccatcccgacccagcagcagcgggagagacctcctcctcgcagtcgcaggtggtggctgtgacgacgggaagcgacagcagccaagattctgaagatgatttttgctcctgcatttctgacgacgacgacgatgcttgg

SEQ ID NO: 30 - protein, 1010 aa, Aegilops sharonensis
MSLLMGVRKDIWFIKDELATMQAFLVAAEAMKEKDMLLKVWAEQVRDLSYNIEDCLSEFMVHVASQSLSRKLMKLKDRHRIAIQIRDLKSRVEEVSNRNTRYNLIEKNQFARAADERDSYMEDIRNQSASNIDEAELVGFSEPKQKLIDHLHVHANNGPPRVVCVVGMGGLGKTTLTRKVYESMKSFSCCAWIIVSQSFVRTEFLKVMIKELFGSDALKKQLEENVGSEVNLANYLQRELPRQRYFVVLDDLWNIDDWNWMRSVVFPSSNNKGSRIVVTTRDLGLAKKCTLESSSPLIYRHEPLKTNDAINLLLRKTRKSEEEMKKDGNMRKIVTKIVKKSGKLPLAILTIGGMLATRMVNEWESIYDQLPSELGRNGSLEAMRRMVTLSYNHLPSHLKSCFLYLSIFPEDFEIKRRRVVERWIAEGFIIARSGVSLEDVGNCYFIDLINRSLIQAARVNIHGIVKSCRVHDIVRDVMISISRDEKFAWSTLDNETSIAGDNFRHIALQGSWCPNKGFDWNHVRSLTMFDERPMKPTPSLCSPDFRMLRVLDLYDVHFVINQKDINTIGSLRHLKYVHVAGRGNYIYKLPRTIGKLQGLQTLDMRGCKVASLPIEITKLESLRSLRCSKTTLDGLVYPKIWLLYTFCTPILSTPLVSPDERHIMMSIQMTWTGRFSNSPGVRVPKGISKLKELEILEIVDIERTSRKAVKELGELIKLRKLSVGVGASKQKSKILSTSLEKLTSLRSLCLRVDKNPSGRSGASLKWLLQSVSSPPPLLRKLTLRGDLGEFPDWFGDLVHLVKIGLRSSNLKDGDESMKLLGALPKLMLLRLDWGSYVGEKLVFIAETFPSLRRLDIWGLTQLTELVFEVGTSPQLEKIQISVCRLESGITGIKHLPRIKEIFLYYGGQVAKLGALQGEVNAHPNRPVLRLQENRRHHDLGDVAEGSTSAVQVEEARGVGEESSLHPDPAAAGETSSSQSQVVAVTTGSDSSQDSEDDFCSCISDDDDDAW

SEQ ID NO: 31 - DNA, 2760 bp, Aegilops sharonensis
  CDS (1)..(2760)
atgcggcgagaagaactccttgagcgaagaaccatggagaaatttctggtgagtgcatccacgggagccatgggctccatcctgaaaaagttgggcaccatcctgagcgacgaatacaagctgctcaagggtgtccgcgacaacatcaagttcctcaaggatgagctcgaggccatgcaagcgttcctcatcgagatggcagacatggagaaacctgacaagcaagctaagcttcgtgcagatgttgtgcgagagatgtcctatgagatcgaggacaacatcgacaagttcatggtactcatagaacatgagcccagttccgagtctgatggcttcgggaagctctttagcaaaaccatgaaaaagataaaagatatcaagacccgccataagatcgccaaggacatcaaggacatcaagattcaagtgaaagagattagtgcaagatattcaaggtacaagatcgatgagtcttctagacctagaaacaaaaaggttgacccgcgactttgcgcggtctataaagatgcatcggagcttgttggcatcgatggtccaagagaagaacttgtgacctggttgagcaaggagaagggtgcatcggcacaccagttgaaagttgtccccattgtcggatatgggggactaggaaaaacgactcttgccaaacaagtctatgacaagcttgcagcaaactatgaatgtcgggcttttgtgtcaatttcacgtagtcctgatatgctgaagatcctgagttctatattatctcaactccgtaatcagaacaatgcttgtgcaggagatgaacaacacatcatcgaccaaatcagaaacttcctccgtgataaaaggtaccttatcgtaattgatgatgtatgggatgtacaaacatggaaaacactggattgtgcactagtcaggaacggttgtggtagtgtaataattagcacaacacgcatacacaatgtagctcaatcatgttgctcatctgatgtggaccttatccatgaaattcaaccacttggtattgctgactcaaagaagttatttttcaagcgaatatttggctgtgaggagaagtgccctcataacttgaaagaaccgtcagaagatatcttgaaaaaatgtggtggtttgccattggctatcagtgccatatctagcttgttagctactgagaaaactctagaagagtgggatcaaattcgaagttctattggctttgcacaagaaacaaattcagatattgatgccatgaattacatattatctttgagctactttgaccttcccctctatctaagaagttgcctattgtacttgactatgtttcctgaagatcatgagattgaaagggatcgtttggtatacaagtggatttcagagggcctcatccatggtagagaaggagaagatcttgttaaattaggagatgaatatttccatgaacttatcaatagaagtttaacacaaccagtgggcatcgggtatgatggcaaggcattgtattgccgagtccatgataccgtccttgatttcctcatttacaaatccaatgaagagaacttctgtactttcttaagcaatcatcctaaggcagatggcaaagtccggcggttgtctctgatgggaaatgaagatcaaggaaatgtcgagcaattggatttatcacatgctagatcactctgtgcttttggtaattcccgaaaatatctgccttcccttgcgaagttaaatgctctacgtgtgctggacataggtcaatgctttgaactaggaaatcatcatgtcaaagatattggaagattatttcagctcaggtacttgaacatccatttgacaaatataaccgagattcctagagaaattggagacttggagtatctagagacgctaaatgtgaggaatacagaactactagagctacctgaatcggttactcggctaaaacgactggcacgtctgtttgtatcagttcgaactaaattgccggattgtgttggtaaaatggaaaagctgcaggagcttggcaacatagacacctccctgcaatcagtgaagtgtctggaagagctcggcaaactgaaaaatctgagaaagatgcgcattcgttgggacaccagtgaacttgacaaatcaagttgcaagggagaaaagctagtgtcctcactctgtgaattgaatgcatgcaaacttcgcaacctctatatcactgtttttctgggagaagaagatggcctcaaagggcatccgtccttccctgctctcagtagcatccgaacaatttgtttatgccgtgggcaactttgctggattaccaaatggctggtttcacttcccaacctagaagaattatctgttcttggtgggacaaagatagagcagcaggatgttgagatggttggaaaaataaccactctgctccaattcagtggcaacataaggcccattgtcatcactaccgatgcagggtttcaacagttgcaggtgcttgcgctcaactgcggtgtcacagggttaacgtttcaagcaggtgccatgccaaatcttaagaagattcaaatgcagattcatctaagtcagttcaaatcagaacatggtgttggtgttttggatgattttggcttccaacacctctctagtcttgctctattggatatagagatggattgtcgtgactcgagagctgcaaatgtggaggctgcagaggatgctgtcaagagcatggcggaaacgcaccccaaacacccccacttaaaa

SEQ ID NO: 32 - protein, 920 aa, Aegilops sharonensis
MRREELLERRTMEKFLVSASTGAMGSILKKLGTILSDEYKLLKGVRDNIKFLKDELEAMQAFLIEMADMEKPDKQAKLRADVVREMSYEIEDNIDKFMVLIEHEPSSESDGFGKLFSKTMKKIKDIKTRHKIAKDIKDIKIQVKEISARYSRYKIDESSRPRNKKVDPRLCAVYKDASELVGIDGPREELVTWLSKEKGASAHQLKVVPIVGYGGLGKTTLAKQVYDKLAANYECRAFVSISRSPDMLKILSSILSQLRNQNNACAGDEQHIIDQIRNFLRDKRYLIVIDDVWDVQTWKTLDCALVRNGCGSVIISTTRIHNVAQSCCSSDVDLIHEIQPLGIADSKKLFFKRIFGCEEKCPHNLKEPSEDILKKCGGLPLAISAISSLLATEKTLEEWDQIRSSIGFAQETNSDIDAMNYILSLSYFDLPLYLRSCLLYLTMFPEDHEIERDRLVYKWISEGLIHGREGEDLVKLGDEYFHELINRSLTQPVGIGYDGKALYCRVHDTVLDFLIYKSNEENFCTFLSNHPKADGKVRRLSLMGNEDQGNVEQLDLSHARSLCAFGNSRKYLPSLAKLNALRVLDIGQCFELGNHHVKDIGRLFQLRYLNIHLTNITEIPREIGDLEYLETLNVRNTELLELPESVTRLKRLARLFVSVRTKLPDCVGKMEKLQELGNIDTSLQSVKCLEELGKLKNLRKMRIRWDTSELDKSSCKGEKLVSSLCELNACKLRNLYITVFLGEEDGLKGHPSFPALSSIRTICLCRGQLCWITKWLVSLPNLEELSVLGGTKIEQQDVEMVGKITTLLQFSGNIRPIVITTDAGFQQLQVLALNCGVTGLTFQAGAMPNLKKIQMQIHLSQFKSEHGVGVLDDFGFQHLSSLALLDIEMDCRDSRAANVEAAEDAVKSMAETHPKHPHLK

SEQ ID NO: 33 - DNA, 2799 bp, Aegilops sharonensis
  CDS (1)..(2799)
atgcggcgagaagaactctttgagggaagaaccatggagaaatttctggtgagtgcatccacgggagccatgggctccatcctgaaaaagttgggcaccatcctgagcgacgaatacaagctgctcaagggtgtccgcgacaacatcaagttcctcaaggatgagctcgaggccatgcaagcgttcctcatcgagatggcagacatggagaaacctgacaagcaagctaagcttcgtgtagatgttgtgcgagagatgtcctatgagatcgaggacaacatcgacaagttcatggtactcatagaacatgagcccagttccgagtctgatggcttcgggaagctctttagcaaaaccatgaaaaagataaaagatatcaagacctgccataagatcgccaaggacatcaaggacatcaagattcaagtgaaagagattagtgcaagatattcaaggtacaagatcgatgagtcttctagacctagaaacaaaaaggttgacccgcgactttgcgcggtctataaagatgcatcggagcttgttggcatcgatggtccaagagaagaacttgtgacctggttgagcaaggagaagggtgcatcggcacaccagttgaaagttgtctccattgtcggatatgggggactaggaaaaacgactcttgccaaacaagtctatgacaagcttgcagcaaactatgaatgtcgggcttttgtgtcaatttcacgtagtcctgatatgctgaagatcctgagttctatattatctcaactccgtaatcagaacaatgcttgtgcaggagatgaacaacacatcatcgaccaaatcagaaacttcctccgtgataaaaggtaccttatcgtaattgatgatgtatgggatgtacaaacatggaaaacactggattgtgcactagtcaggaacggttgtggtagtgtaataattagcacaacacgcatacacaatgtagctcaatcatgttgctcatctgatgtggaccttatccatgaaattcaaccacttggtattgctgactcaaagaagttatttttcaagcgaatatttggctgtgaggagaagtgccctcataacttgaaagaagcgtcagaagatatcttgaaaaaatgtggtggtttgccattggctatcagtgccatatctagcttgttagctactgagaaaactctagaagagtgggatcaaattcgaagttctattggctttgcacaagaaacaaattcagatattgatgccatgaattacatattatctttgagctactttgaccttcccctctatctaagaagttgcctattgtacttgactatgtttcctgaagatcatgagattgaaagggatcgtttggtatacaagtggatttcagagggcctcatccatggtagagaaggagaagatcttgttaaattaggagatgaatatttccatgaacttatcaatagaagtttaacacaaccagtgggcatcgggtatgatggcaaggcattgtattgccgagtccatgataccgtccttgatttcctcatttacaaatccaatgaagagaacttctgtactttcttaagcaatcatcctaaggcagatggcaaagtccggcggttgtctctgatgggaaatgaagatcaaggaaatgtcgagcaattggatttatcacatgctagatcactctgtgcttttggtaattcccgaaaatatctgccttcccttgcgaagttaaatgctctacgtgtgctggacataggtcaatgctttgaactaggaaatcatcatgtcaaagatattggaagattatttcagctcaggtacttgaacatccatttgacaaatataaccgagattcctagagaaattggagacttggagtatctagagacgctaaatgtgaggaatacagaactactagagctacctgaatcggttactcggctaaaacgactggcacgtctgtttgtatcagttcgaactaaattgccggattgtgttggtaaaatggaaaagctgcaggagcttggcaacatagacacctccctgcaatcagtgaagtgtctggaagagctcggcaaactgaaaaatctgagaaagatgcgcattcgttgggacaccagtgaacttgacaaatcaagttgcaagggagaaaagctagtgtcctcactctgtgaattgaatgcatgcaaacttcgcaacctctatatcactgtttttctgggagaagaagatggcctcaaagggcatccatccttccctgctctcagtagcatccgaacaatttgtttatgccgtgggcaactttgctggattaccaaatggctggtttcacttcccaacctagaagaattatctgttcttggtgggacaaagatagagcagcaggatgttgagatggttggaaaaataaccactctgctccaattcagtggcaacataaggcccattgtcatcactaccgatgcagggtttcaacagttgcaggtgcttgcgctcaactgcggtgtcacagggttaacgtttcaagcaggtgccatgccaaatctcaagaagattcaaatgcagattcatctaagtcagttcaaatcagaacatggtgttggtgttttggatgattttggcttccaacacctctctagtcttgctctattggatatagagatggattgtcgtgactcgagagctgcaaatgtggaggctgcagaggatgctgtcaagagcatggcagaaacgcaccccaaacaccccacacttaaaatgaagagagtgtgtgaagaacagatgctacaggatgag

SEQ ID NO: 34 - protein, 933 aa, Aegilops sharonensis
MRREELFEGRTMEKFLVSASTGAMGSILKKLGTILSDEYKLLKGVRDNIKFLKDELEAMQAFLIEMADMEKPDKQAKLRVDVVREMSYEIEDNIDKFMVLIEHEPSSESDGFGKLFSKTMKKIKDIKTCHKIAKDIKDIKIQVKEISARYSRYKIDESSRPRNKKVDPRLCAVYKDASELVGIDGPREELVTWLSKEKGASAHQLKVVSIVGYGGLGKTTLAKQVYDKLAANYECRAFVSISRSPDMLKILSSILSQLRNQNNACAGDEQHIIDQIRNFLRDKRYLIVIDDVWDVQTWKTLDCALVRNGCGSVIISTTRIHNVAQSCCSSDVDLIHEIQPLGIADSKKLFFKRIFGCEEKCPHNLKEASEDILKKCGGLPLAISAISSLLATEKTLEEWDQIRSSIGFAQETNSDIDAMNYILSLSYFDLPLYLRSCLLYLTMFPEDHEIERDRLVYKWISEGLIHGREGEDLVKLGDEYFHELINRSLTQPVGIGYDGKALYCRVHDTVLDFLIYKSNEENFCTFLSNHPKADGKVRRLSLMGNEDQGNVEQLDLSHARSLCAFGNSRKYLPSLAKLNALRVLDIGQCFELGNHHVKDIGRLFQLRYLNIHLTNITEIPREIGDLEYLETLNVRNTELLELPESVTRLKRLARLFVSVRTKLPDCVGKMEKLQELGNIDTSLQSVKCLEELGKLKNLRKMRIRWDTSELDKSSCKGEKLVSSLCELNACKLRNLYITVFLGEEDGLKGHPSFPALSSIRTICLCRGQLCWITKWLVSLPNLEELSVLGGTKIEQQDVEMVGKITTLLQFSGNIRPIVITTDAGFQQLQVLALNCGVTGLTFQAGAMPNLKKIQMQIHLSQFKSEHGVGVLDDFGFQHLSSLALLDIEMDCRDSRAANVEAAEDAVKSMAETHPKHPTLKMKRVCEEQMLQDE

SEQ ID NO: 35 - DNA, 3207 bp, Aegilops sharonensis
  CDS (1)..(3207)
atggctagctatggagcctcactcggctccgtcacgaccttcatcctgccgaagatctggtcggtatgctgttggcaaaagcaagatcttcgagatgcagtcgattccttgaagctgcagcataagcatatcctggggaagattcgagaataccgcgccttgcacgcacgtttcagcgatattgggggaaccctggatgagcatattgcagatctgagacgcatggcaaatgaaatggaggactgtatagacagctgccatatcgcggagacgacaagaacgcgcgcagagcttcttagaaagattcctcgtctcaaggaaagatccgaaaaactggaagtggattataagggcccagggaaatccaccggaggggaaacaacgacctcaagaaaagaagcaagtagtggagcttctggacatgggcaatcatattctggaggtggcttccgagttgtaaaaccgtcctgtgctgatccggtggacatggacggtccaatcaaggaacttctggacctggtgaaggtatcggatagcgaaccggaaagtaagcagctcaaggtgatctccatctctggcttcggtggcttgggtaagactctccttgccgacaaagtttacttccatgaagatgtgtgcgcgcagttcagggtgcgcgctcgcgtcgaggccgcgggaaagagccatgaccaagttctcgaggagatactcaagcaagtacccgggactagtgctaatgatgaagagataccacaaaatggcgagcaaaggtttttgatcataattgtggacatccaagagaataggggcgaaatagcgattgcatctgttttaaagggtcttggtgatgtgcacagtagggttatcgtcacgacaaccattcagagcatagcaacaagctgggcatctccaaacaaccatttgtaccctatgagtacacttaataaagtccactgggaagagctgttcttcagagaatttgatgaagggaaatgcaaaaaaccatcggagatggggcagttaagttcactcaagtcactcctggagaaatgtgacggccttcctcttgctctgatcagcactgcaaaagttttgagtggaactgaactggacaataaagcatgtagagaagcctggaagaagctttgtgacataaaacatgacgaaacaagcacgttacagaaaatgcaacgggtgctagccagcacctgcgctggtctatctggcactaacgtacctcctagccttattgattgcttgctctatttcagcatgttcccaccaaatcatcatgtcaggaagaattctctaataaggcgattgctagctgaaggaatgaagcaacaaaatgttgacaggaaggaatttaatttagaagagcacattgagcgactcatcgaccgaagtatcattcagcccatggaagtgagcacgcggggtgacgtgaagggatgcaaagcttctagtctaatgtacgagtacattttccacagatctaagtctgaggaattcatggcagtgctctctgatgtgatggacaatgggtttgaacggaagggatatgtccgccggctttctatccatgctacagaaactgggattgcagaagagagattgcccgatgatttatcccatctccatactctggcggtattcggcactgagaagccagaagttacgaaggatcttgccaatggtttgtttgggaacaaaggggttcttgccaagtataaaatacttcgggtgttggatttgaaagaatgtgctggtatgaaaggaaaacatcttcaaactatatgtgacctgttgctgctgaaatatctgagcctcggggacagtattgttcgggttccaaggaaaatagcgcagcttaaactgttggaaacactcgatctaagcagaaccaatgtagtgacagtgtacatggaagtcttggggctccccagtttaacacaccttcttgggaaagttcgtttgtccaaatgggactgcatattcggaatggaaaagctgaaaaggttcgtgaggaataaatgtaagttggatacccttggaggattcaccaccggcaagagcgaagcatttccacaactgataggtcatatgcggcaattgaataaggtgaaaatatggatccattccactgctgatacgagaaacttggagcatctaacagaaggcatcaaggaattcgttagaaacacgtatatgggcaaggttggtagggcactatcagttgacttctcagactgcatacaagaaccacaacaatccttgaatttcctaaacctacaagatcctcaaacagaagaggtcgaagaaattgtgaacattcaagacaatacccaaggggctcaattagaacaagatgaacaagcaaatccacgtctcagcactgatggtggcagtacgagcaatcaaatgacgaatatgcaagacaatatccaagagcagcagacagaagaaatagaagaatgtgaacacgcagaacgatccttggatttccttaaacaaaatgtgaacattccagagaataatacccaaggggctcaaattaaacatgaaggagaagcaaaatgtctcggaagcaatgctggcagcacgagcaatcaaatcatgaatatgcaagacaatatccaagaccagcatacggaagaaatagaagagcccaaacaaggtgccccctctgaggatgcgtgttccagaaatgaaactgagatgatgcaaaaccatcagaatatccgagaaggatatgacaaatgtcccaacaagctttcttcgctcaaactttgtggaaagctgacaaattttcctcttcaatttgtcacagagattgctggtattgagaggttgtgcctttcatctacaggtctgtctggggagaatattgcatatgctctaagtgaattgcccgacctgttttatctaaagctgcgtgaagatgacttaagtctcctcgagctgcaaaataagcaatttccgagcctgcggcgcgtttgcttttctgtgaaagatggtaatctgccacgcccaacaatcatcaaacacttccgtaatcttcgcgaagtgtatctgtatgctaatctgaattatgaagaaagacgcagctggaaagcagcttcggagagtcatcctgaaaggccaagagtttatttcgccgaaagcacatgcaagggaacttcttcagaggctgtgatccaaagccag

SEQ ID NO: 36 - protein, 1069 aa, Aegilops sharonensis
MASYGASLGSVTTFILPKIWSVCCWQKQDLRDAVDSLKLQHKHILGKIREYRALHARFSDIGGTLDEHIADLRRMANEMEDCIDSCHIAETTRTRAELLRKIPRLKERSEKLEVDYKGPGKSTGGETTTSRKEASSGASGHGQSYSGGGFRVVKPSCADPVDMDGPIKELLDLVKVSDSEPESKQLKVISISGFGGLGKTLLADKVYFHEDVCAQFRVRARVEAAGKSHDQVLEEILKQVPGTSANDEEIPQNGEQRFLIIIVDIQENRGEIAIASVLKGLGDVHSRVIVTTTIQSIATSWASPNNHLYPMSTLNKVHWEELFFREFDEGKCKKPSEMGQLSSLKSLLEKCDGLPLALISTAKVLSGTELDNKACREAWKKLCDIKHDETSTLQKMQRVLASTCAGLSGTNVPPSLIDCLLYFSMFPPNHHVRKNSLIRRLLAEGMKQQNVDRKEFNLEEHIERLIDRSIIQPMEVSTRGDVKGCKASSLMYEYIFHRSKSEEFMAVLSDVMDNGFERKGYVRRLSIHATETGIAEERLPDDLSHLHTLAVFGTEKPEVTKDLANGLFGNKGVLAKYKILRVLDLKECAGMKGKHLQTICDLLLLKYLSLGDSIVRVPRKIAQLKLLETLDLSRTNVVTVYMEVLGLPSLTHLLGKVRLSKWDCIFGMEKLKRFVRNKCKLDTLGGFTTGKSEAFPQLIGHMRQLNKVKIWIHSTADTRNLEHLTEGIKEFVRNTYMGKVGRALSVDFSDCIQEPQQSLNFLNLQDPQTEEVEEIVNIQDNTQGAQLEQDEQANPRLSTDGGSTSNQMTNMQDNIQEQQTEEIEECEHAERSLDFLKQNVNIPENNTQGAQIKHEGEAKCLGSNAGSTSNQIMNMQDNIQDQHTEEIEEPKQGAPSEDACSRNETEMMQNHQNIREGYDKCPNKLSSLKLCGKLTNFPLQFVTEIAGIERLCLSSTGLSGENIAYALSELPDLFYLKLREDDLSLLELQNKQFPSLRRVCFSVKDGNLPRPTIIKHFRNLREVYLYANLNYEERRSWKAASESHPERPRVYFAESTCKGTSSEAVIQSQ

SEQ ID NO: 37 - DNA, 2982 bp, Aegilops sharonensis
  CDS (1)..(2982)
atggcccaagacatcgtccagagggcatgcgcgaagctcggatccgccgtagaagatgaagccgtggtgcgttcgaacttcatcggtgacctggatgatatgttgcgggcgctggaggccatccaaccggtgctggagaattccgagatgaagcagttcaggagtatattggtggcgaattggctgcagcttgtctgcagcgcggcctacaagaccatagacactgtcaatgagctgcacgacgcgagaccacaggctgctgcaacgttgacaaggatgctgccccaccttgccatcgtgaagaatgccatggccatcgaggtgcaggagacgagaaaactagtgatgcaggcacaggagaggtcaagtcggtttccaaattaccccaaaattaccgaggaaccaaaaactcgaccagtttctgaggaagcaatgatttttggaagaggatcagataaagagaggataatagccgccctgctatctactaagcccaacatcatccaagagcacatcaccattcttcccatctttgggcttccaggcagcggcaagacaaccttggcacaaattgtatttaacgatacccactcccttcaaggctatgacttccgggtatggtttcatgtgtctccccagttggacttccatgcactaggcaactacattatttgtcacgtgttggaaagggggcaagaagcttcagacatggaggggatggagggtataatgaagcgccttcacgagctacttcatcgtaagaaggtgctccttatattggatgacttgtgggaagaggatcccattcagttacagctgttgaagtccatgttaactttcttgggagacaagatggacgtaatagtaacgacaggcaaccaagccatcgctaggaacatctgtacagttgagccgtacaggctaaatcggttgagtgatgacacatgttgggaaataatcaagaaatcgatcagtttcgaaggaggggaagaagagttggagaagattggacgggagatcgcaaccaagtgcttgggtgtaccattagtagctcaagaatatgcacgcatgctatattcttcccgagatgctatgacatggcaaagatccatggaagagaatgtctggcttaatattattaaggcaggagtgccgttatcccttgcaagattcgagctaaactacaagagtatgtcaccatatttgaggctatgctttgattattattgtgcagtcttcccaactggcaacaacatagtcaaagatgacctggttcatcaatggattgctctgcacctcattgagccatctgaaacattgtctgccgcacagatagctgaggagcatattaccaggcttcagaacatgtcattccttcaaactgcagagctggaccacgccagtggagccaataagggtgcaattttgttgactatgcacgctgtggtgcacaacctcgcgacaatgttcctagaaaattcaagctaccatctagccaccaatcatcatgggaaacttgatgtgccttatggtaagtacataagagcactgcgctgtgtcggctgtagcaacgtggagtttaaaggtggctcatttccacatgagaagtggctacgtgtcctggaattaacggagagctccgtgctgaagctaccgggctacatctggcaactgaagcacctggggtatcttaagatttcagaattctctggactggtaactctgcccgagtcatttgggaatctcataaatctgatccacatcaacttatcaggctgctcggggctactcaacctaccaaagtcgtttgggaagctaatccgtttagtccatgccaacttgtcgggctgctctggtcttgcaacacttcctgaatcgtttggcgatctcataaacttgtcccatgtcaatctgtcacgctgcaatgcattggcagagcttcctgaaccgctccagaagctcgacaaactggtgcacctggatttatcattctggtcttgtttagaagagatcgggaaaaaccttggtggcctcaccactctggagcatttgaacttatcaaacccttgctgtcatcttgctcagcaccgttccgatctccaagggctaaaagatggtttatgcaagctcaccaaactccggcatctgaacttgtcagcgtgcctgaatcctatcttttactaccaccagtcacaagaggacagtctcaaattccttggagagtgcgtcagcggcctttccagcctagaacatttagacctgtctcatcacacatttctttttggtctacctgggagtctaggtgagctcaacaagctaaaaacactgaatctctcaggctgcatcagactcaagaaggttggtgaaatgaagtctctcaagtttatagatctgaggaagtgtcggggcctagagaattgccagtttgtggttcgcattgtcgatgatgacgttgcatatagcagcagcaacattgttcagctggaggaggttaattgtcaagagctccagataagctgcctagaaaaggtcaagtctaaagaggaagcacagagagtcaaattggtggagaaacagaagcttgaaaagttgaagctttcttggactttggactctgtgggacgagtggaggacaatgctttgttgggggaattagtgccaccacctaatctgcagtgccttgaggttaatggctacaccggcacatgtcttcccgagtacttgggtgagctcatctctctccaggaactcaagatcgtccgctgcaagcacctcaactcgttaccggatagcatgcagaaactcaccagcctcaaggatctgtgtatttttgactgcccagaattggagaagtggtgtcaggttgaggagaacaagaaaatgctggtgcacatccccaacaaaaattatgaggaacctgctagtactagcaggcaggagattgaggaggacgacaaatcgggcgacgaggtgggggcggcg

SEQ ID NO: 38 - protein, 994 aa, Aegilops sharonensis
MAQDIVQRACAKLGSAVEDEAVVRSNFIGDLDDMLRALEAIQPVLENSEMKQFRSILVANWLQLVCSAAYKTIDTVNELHDARPQAAATLTRMLPHLAIVKNAMAIEVQETRKLVMQAQERSSRFPNYPKITEEPKTRPVSEEAMIFGRGSDKERIIAALLSTKPNIIQEHITILPIFGLPGSGKTTLAQIVFNDTHSLQGYDFRVWFHVSPQLDFHALGNYIICHVLERGQEASDMEGMEGIMKRLHELLHRKKVLLILDDLWEEDPIQLQLLKSMLTFLGDKMDVIVTTGNQAIARNICTVEPYRLNRLSDDTCWEIIKKSISFEGGEEELEKIGREIATKCLGVPLVAQEYARMLYSSRDAMTWQRSMEENVWLNIIKAGVPLSLARFELNYKSMSPYLRLCFDYYCAVFPTGNNIVKDDLVHQWIALHLIEPSETLSAAQIAEEHITRLQNMSFLQTAELDHASGANKGAILLTMHAVVHNLATMFLENSSYHLATNHHGKLDVPYGKYIRALRCVGCSNVEFKGGSFPHEKWLRVLELTESSVLKLPGYIWQLKHLGYLKISEFSGLVTLPESFGNLINLIHINLSGCSGLLNLPKSFGKLIRLVHANLSGCSGLATLPESFGDLINLSHVNLSRCNALAELPEPLQKLDKLVHLDLSFWSCLEEIGKNLGGLTTLEHLNLSNPCCHLAQHRSDLQGLKDGLCKLTKLRHLNLSACLNPIFYYHQSQEDSLKFLGECVSGLSSLEHLDLSHHTFLFGLPGSLGELNKLKTLNLSGCIRLKKVGEMKSLKFIDLRKCRGLENCQFVVRIVDDDVAYSSSNIVQLEEVNCQELQISCLEKVKSKEEAQRVKLVEKQKLEKLKLSWTLDSVGRVEDNALLGELVPPPNLQCLEVNGYTGTCLPEYLGELISLQELKIVRCKHLNSLPDSMQKLTSLKDLCIFDCPELEKWCQVEENKKMLVHIPNKNYEEPASTSRQEIEEDDKSGDEVGAA

SEQ ID NO: 39 - DNA, 2817 bp, Cynosurus cristatus
  CDS (1)..(2817)
atgccggatccgattaccattggtgctgtgggatggggtgtatccgcactaggttggctcgcctcgccaatcatttccagggtcctcaacaaaggtttcgcccaactcgacttcgacgcatccaagaagctgaagatacttgatatacaagttcttcaactgcagcgggtgatagaagtagtcgacgggagcacttacagggatcgcttggagccgctgttaaacaacctcaaatctgccttctacgaagccgaagacatcttggatagtatcgagtatcagagtctcaagaagcagatcgaagatgcaaagtcagatggcagtaagaaggattttctaaggaataattttcagtctttcaaaccgaagttctccctaaaagatgaggagagtggtatgtcaaaaaataagttaaaggagagcctagagaagatagaaagtgctataagtggtgcatgcgaagttttggaaaaactgaacttgccaggtgtaagtaatgataactggagacgagctgctgctaccagttcacgtagtgcaggcataactgtaggtcctcctctacgagtaattggtcgagatcaagatcgtgacaatatcatagcaatgcttcatgagaacgaagagcagtctcaagcaaacaccgtcaagggtacaggttattctgtaattggcattcatggcatcgccgggtctgggaaatctacacttgcacggtgtatttatgatcatgagaaaaagcaaaaacatgagaaaaaggaaggacatttcgatattgtcatgtggattcatgtttcccagaaattcgatttggattccattttcagtgaaatgtttgagggggcaacacaggaagcatgcccgaaattcagtagtcttaacattctaaaggaaaggctggaggagaaactgtgtgaaaagcggattttgttggtactggatgatgtctggtacaacaataacaactcagaagaccgtgaagaactacaaaagctaatttctcctctgcatgtcgggaaggcaggaagcagaatcttggtaaccagtcgaactgaatctccttcgaaaattctgggtgctgtagaagagagacgtattgcaatatcagacctggatgatgacgtgttccttgaaatgttcatgcattatgcacttcgagatacaagggtaggtgaacatgatcgaagaatacttgaaatgattggagaggaaattgcaataaagctaaagaaatcacctctagcagcgagaacagtgggttcacggctccgtgattatcccaatgttgagttttggaggagtgagaaagatcgggacctactgaacaatacgatgggagctttgtggtggagctaccagtacctcgatgagcaggtcagacgatgcttcgcttactgcagtatttttcccagaggacatcatttgaaaagagatgagttagttaagctgtgggtggcagaagggtttataaagactagtaagcctgaagaggaagtggaagatgttgctaagaagtattttaatgagttgatatctgcctcatttctgcaattaggagggaaagaaaggtcatttgacaaatatgagtatgatggttctgaagagtttagttactttacaattcatgacctgctgtgtgatttggcagaggaggttgccggaagagattgcttcaggatcgagaaaggctacacaggagaagttcctcaagatgttcgctatctttttgttgaggcttacgatagcgagatgcttacagagaagattggtggattgcaaaatttacgcactctcatcatcaaggacgggataagtgtgtcgtcatttgagtgcagattattcgtgagtaagtttaatatgttcatggggctgaagaagttgcgggtactgagtttaattgtccaatatgaaggtacatctgattatagtttaattgcgacaacaaataatacgttatccccgaaaattggtcagttgaagcatctgcgttattttgctttcaaggtgaatggagctaccgggttaactattccagatgatttttccaagctttaccacatgcaggtggtagattttggtgggtgctgtagcttgacgttttctggtgatcaagatatgacgaacctcgtcaacttgcgccgtataatcagcaggccaagtgttgattttccaaacattggcaggatgagatggctccaactgttaccgtccttcagaataaggaaggaacaggggtatgagtcacatcagctgaagcacctaaataagcttcaggataaactgcagatctatggtcttgagaatgttcaaagcaaggaggaggctcttgaagtcaatcttgctggcaaggaaaaactcacagaactggaacttgagtggtctgatgagatcagctgtccagaagttcaagcagaggtacttgagggtctttgcccatcgaagtatcttgaaaaactacgaataaggggatacctcggtacgacattaccaaactggatgatggctgggtataatggcagtccaaagaacctacaagaccttacattgtgggactggagccaacgaggacttgctcctgaccttgggcctttcattcatcttcagttcctattcctttacaagtgcggctggaatgccttaccagacatggagcacctcacatcgctcaagcgactggagatctggcagtgcgtgaatatgcggtcgtttggaacactgcccaagtctcttgagaagttttacttgagcgactgccatcccgagttcaagtggtatctggactgctggtccaaagaacatcccggtgttgagaactgg

SEQ ID NO: 40 - protein, 939 aa, Cynosurus cristatus
MPDPITIGAVGWGVSALGWLASPIISRVLNKGFAQLDFDASKKLKILDIQVLQLQRVIEVVDGSTYRDRLEPLLNNLKSAFYEAEDILDSIEYQSLKKQIEDAKSDGSKKDFLRNNFQSFKPKFSLKDEESGMSKNKLKESLEKIESAISGACEVLEKLNLPGVSNDNWRRAAATSSRSAGITVGPPLRVIGRDQDRDNIIAMLHENEEQSQANTVKGTGYSVIGIHGIAGSGKSTLARCIYDHEKKQKHEKKEGHFDIVMWIHVSQKFDLDSIFSEMFEGATQEACPKFSSLNILKERLEEKLCEKRILLVLDDVWYNNNNSEDREELQKLISPLHVGKAGSRILVTSRTESPSKILGAVEERRIAISDLDDDVFLEMFMHYALRDTRVGEHDRRILEMIGEEIAIKLKKSPLAARTVGSRLRDYPNVEFWRSEKDRDLLNNTMGALWWSYQYLDEQVRRCFAYCSIFPRGHHLKRDELVKLWVAEGFIKTSKPEEEVEDVAKKYFNELISASFLQLGGKERSFDKYEYDGSEEFSYFTIHDLLCDLAEEVAGRDCFRIEKGYTGEVPQDVRYLFVEAYDSEMLTEKIGGLQNLRTLIIKDGISVSSFECRLFVSKFNMFMGLKKLRVLSLIVQYEGTSDYSLIATTNNTLSPKIGQLKHLRYFAFKVNGATGLTIPDDFSKLYHMQVVDFGGCCSLTFSGDQDMTNLVNLRRIISRPSVDFPNIGRMRWLQLLPSFRIRKEQGYESHQLKHLNKLQDKLQIYGLENVQSKEEALEVNLAGKEKLTELELEWSDEISCPEVQAEVLEGLCPSKYLEKLRIRGYLGTTLPNWMMAGYNGSPKNLQDLTLWDWSQRGLAPDLGPFIHLQFLFLYKCGWNALPDMEHLTSLKRLEIWQCVNMRSFGTLPKSLEKFYLSDCHPEFKWYLDCWSKEHPGVENW

SEQ ID NO: 41 - DNA, 2190 bp, Cynosurus cristatus
  CDS (1)..(2190)
atgcaggcgccccccgccggggtcccgcccgccatgtccctccccgtcgcgctgccgccgtgcaagggcatggcgatggccgtggatgcggcgccgccgtgcaagcgcatggcgatggccgtggatgaggagccgccgtccaagcgcatggcgatgtccgtcgacgtggcgccgccgtccaagggcgtgcccatggatttcgaggtcccggaggtggaattcgtcaagggcagtagtggggtggtggtgggaagcggcgtcaaggtaggcaaggagaaggtgaaggagatggtcatgagcggcggcgccggctgggaggtcgtcggcatctgcggcatgggcggcagcggcaagaccacgctcgccatggagatctacaaggatcagaaggtccaaggctacttcaacaatagaatcttctttgagacggtctcgcaatctgcgaatttggagaccatcaagatgaggctgtgggagcagatcagcagcaacatcgtgcttggtgcatataaccagatcccggagtggcagctcaagttagggccaagggacaaagggccagtccttgttatacttgatgatgtgtggtctctttcacagcttgaggagctcgtcttcaagtttcctggctgcaagacccttgttgtatcaaggctgaagttccccactttagtcacccggacttacgaaatgaaattactcggcgaagaggaggctttgtctgttttctgcagtgctgccttcgaccaggagtgtattcctcagaccgctgacaagaaactggttaagcaggtagctgccgagtgcagagggcttccgctagctttgaaggtcatcggtgcatctttgcgtgatcagcctcctatgatatggttgagtgcgaagaaccgcttgtcacgaggagagtctatatctgactcgcatgagaccaagctcctggagagaatggcagccagtgttgagtgcttgtcaggaaaggttagagagtgtttccttgatctgggttgcttcccagaggataagaagatccctcttgatgtgttgatcaacatttggatggagatacatgatcttgatgagccagatgctttcgatatcctgatggagctatcgaacaaaaacctgcttaccctagttaatgatgcacagaacaaagcaggagatttatacagtagctatcatgactactcagtgacacaacatgatgtgttgcgtgatctggcacttcacatgagcggccatgatgttttgaacaagcggggacgattagtaatgccaagaagggaagaatcacttcctagagattggcagaggaacaaaagcattccttttgaagcccagatagtttctattcatacaggtgagatgaaagaatctgactggttccagatgagcttccccaaggcagaagttcttatcctgaacttcgcctcgagtgtgtactacctcccgccattcatcgcaagtatgcagaacctgaaggcgctggtactgatcaactatggcactaccagtgcggcccttgacaatttgtctgccttcaccacactcagtgacctgaggagcctctggctggagaagattacactcccgccgctgccaaaaagcacaatcccgctgaagaacctgcgcaagatctctctcgtcagttgtgagctaaacaacagtctaagaggctccacgatggacctctcgatgacgttcccccgactatccaacctcaccatcgaccattgcgtagatctgaaggagctgccacccagtatatgcgagatcagctccctggaaagcatctccatttcgaactgtcatgacctcacagagctgccacatgagctgggcaagctgcactgcctgagcatcctacgggtatatgcctgccccgcgctgtggaagcttccgccgtcggtatgcagtctgaagaggctgaagtacctggacatatcccagtgcatcaacatgacagacctcccggaggagctcggtcacttgactaacctagagaagatcgacatgcgggaatgctcacggttgaggagcctcccgaggtcctcctcgtcgctcaagtccctcgggcacgttgtgtgcgacgaggaagcggcgatgctgtggcgggaggccgagcaggtcatcccggacctccgtgtgcaggtagcagaggagtgttacaatctggactggcttgtagac

SEQ ID NO: 42 - protein, 730 aa, Cynosurus cristatus
MQAPPAGVPPAMSLPVALPPCKGMAMAVDAAPPCKRMAMAVDEEPPSKRMAMSVDVAPPSKGVPMDFEVPEVEFVKGSSGVVVGSGVKVGKEKVKEMVMSGGAGWEVVGICGMGGSGKTTLAMEIYKDQKVQGYFNNRIFFETVSQSANLETIKMRLWEQISSNIVLGAYNQIPEWQLKLGPRDKGPVLVILDDVWSLSQLEELVFKFPGCKTLVVSRLKFPTLVTRTYEMKLLGEEEALSVFCSAAFDQECIPQTADKKLVKQVAAECRGLPLALKVIGASLRDQPPMIWLSAKNRLSRGESISDSHETKLLERMAASVECLSGKVRECFLDLGCFPEDKKIPLDVLINIWMEIHDLDEPDAFDILMELSNKNLLTLVNDAQNKAGDLYSSYHDYSVTQHDVLRDLALHMSGHDVLNKRGRLVMPRREESLPRDWQRNKSIPFEAQIVSIHTGEMKESDWFQMSFPKAEVLILNFASSVYYLPPFIASMQNLKALVLINYGTTSAALDNLSAFTTLSDLRSLWLEKITLPPLPKSTIPLKNLRKISLVSCELNNSLRGSTMDLSMTFPRLSNLTIDHCVDLKELPPSICEISSLESISISNCHDLTELPHELGKLHCLSILRVYACPALWKLPPSVCSLKRLKYLDISQCINMTDLPEELGHLTNLEKIDMRECSRLRSLPRSSSSLKSLGHVVCDEEAAMLWREAEQVIPDLRVQVAEECYNLDWLVD

SEQ ID NO: 43 - DNA, 2547 bp, Cynosurus cristatus
  CDS (1)..(2547)
atggactgtgccatatttggcgccttagtgaccatcgccctgcccatggtgataaaggagttaaagactagtttttctgcaaagcctgatcttgaatccattcagagcgagctggagttgatcctagctattatcggagggcctcgctggaaagccaaaaataccagtgatttgcggcaagcctggatcgtgcaactcacaaggttggcagctgatattgaatactccatggacaatttcctggtcaagactacctctgctacaaagtttgccaaggagattcgtgacctcaggatgaaaataaaagagtcatcggagagtctgcaacgtcacctcgaccagaacgaggagctgagcaatgaagaggatgttcctgcaactccaattatgagcaataacgcagaagaagatcttcttatgctcttagagagccaatctgagatgaaggcgaaggttatctctgctattggattcggtggccagaatagtgatattgcaaggcgagtctacgagaaggatgaggtacgccggaaattcagtcaacaggcctgggttagtgcagtggacaaaagtgttgatgatatcctgacggagatactcgggcaatttgtgcctcacccatctccctccgacgtcaagcatcagcttgaatcacgcctaagcaaagaaaggtatttgattgtaattgctgatgtgaggacaacagaggtgttcaatgaaatatctaccttctcctgggccaacagagtgggcggcagaatcatcgtgacggcggacatcgatccggcagcgagagcatgcgtctgtggtaacgctcttccacaacttgttccagatagcaccacacctggcctggttttggtgggagaggtgggtgggatgtcttacgaagggacctgcttcgcactttgtgctgcggccgtagcaagaacagaagggttgcttggcactgactacgagagggctgttcttgaggattgcttgctatatttcagcatgttcccacgtggtcatgatgtcaggacgaatcctctaataaggcgatggctggcggagggaatacctgtatatgcaaaacagaaagtccctgagtatgtgtacatgtctaataagaagattgtggctcagcatttagacaatctcatccgtaacaatattatcaagtctgttaagaagagcaacaatgggaaggtgaagagatgccaacctccagggatggtgttcaaccacatttgtggcaaagccgtggtcgagaattttttcaccttgttgtgcggtcctagtcagattgagatggccatccaggaatacgttcgccggctttctctccatccttacttgaatgctgaaaatggaggactccatgtgccaaatgtacgtcgtctccttacaatggtggtctttcccactgagggtgcacaatatggatctatcttgaggttagaccagcataagcttctgcgggtgttggatctgcaggagtgtgcttctctggatgctaaacagttcccaaaaatatgtgacatgttgttgctgaaatatctaagccttggggaaagtattgattgcgttccaaggaaaataggtcggctacaatggttagagacacttgacattaggacaaatgatgtagtgacggtgtactcagaattgctcaagctgcccaaactgaaacacctccttgggaagtttcagcttgctagcgaggactgcccagataaaaagcctagcgtgctgaagaagggtgcaaagaagattgggctcaaggatggattctcggagctaaagagattcttgaccaaaaacagtgtgctagagacgctggcaggaatttttgttggcaatggcaaaggacttccacaactgttgagtcatatgttgcggctgacaaaggtgaagatatggtgcgattccaccacagaagggtcgactgacttgtcggatcttatgagaggcatcaaggaattcatcagtcatcaatcacgtatgcccaacgttgatcactccctatctattgacttcagagggtcctcgcgattattcctgtactgcctgctagagcctggcccgcttacgtcgctcaagctgtgtggaccggtgacactatcccgtccagttaatactgctttggagattagcgtacaggaattgtgcctctcgtggactaatctcagcggggctcaaatccaacaagccctcggcaatttgagatgccaactgaaatatctgaaactggttgagaagaaactcgtggggctcaagatacaaaacaatgttcccttcaaagacatggagcggttgtgccttgtgggcgagcaaagtctggacagaataataattcaagatctgagtaagctcgtctcgctacatttgctctgtgaatctctcgctgctcttcccggcatccagatcacaagcctccgaaatctcaaggaagtcggcctccattcggaagcccacggtgacataaaacgtggatgggaagatgctgcaaaggaacatcagcgtaagcccaaagtggtgtccatcgaagtcgaaacgacacag

SEQ ID NO: 44 - protein, 849 aa, Cynosurus cristatus
MDCAIFGALVTIALPMVIKELKTSFSAKPDLESIQSELELILAIIGGPRWKAKNTSDLRQAWIVQLTRLAADIEYSMDNFLVKTTSATKFAKEIRDLRMKIKESSESLQRHLDQNEELSNEEDVPATPIMSNNAEEDLLMLLESQSEMKAKVISAIGFGGQNSDIARRVYEKDEVRRKFSQQAWVSAVDKSVDDILTEILGQFVPHPSPSDVKHQLESRLSKERYLIVIADVRTTEVFNEISTFSWANRVGGRIIVTADIDPAARACVCGNALPQLVPDSTTPGLVLVGEVGGMSYEGTCFALCAAAVARTEGLLGTDYERAVLEDCLLYFSMFPRGHDVRTNPLIRRWLAEGIPVYAKQKVPEYVYMSNKKIVAQHLDNLIRNNIIKSVKKSNNGKVKRCQPPGMVFNHICGKAVVENFFTLLCGPSQIEMAIQEYVRRLSLHPYLNAENGGLHVPNVRRLLTMVVFPTEGAQYGSILRLDQHKLLRVLDLQECASLDAKQFPKICDMLLLKYLSLGESIDCVPRKIGRLQWLETLDIRTNDVVTVYSELLKLPKLKHLLGKFQLASEDCPDKKPSVLKKGAKKIGLKDGFSELKRFLTKNSVLETLAGIFVGNGKGLPQLLSHMLRLTKVKIWCDSTTEGSTDLSDLMRGIKEFISHQSRMPNVDHSLSIDFRGSSRLFLYCLLEPGPLTSLKLCGPVTLSRPVNTALEISVQELCLSWTNLSGAQIQQALGNLRCQLKYLKLVEKKLVGLKIQNNVPFKDMERLCLVGEQSLDRIIIQDLSKLVSLHLLCESLAALPGIQITSLRNLKEVGLHSEAHGDIKRGWEDAAKEHQRKPKVVSIEVETTQ

SEQ ID NO: 45 - DNA, 2742 bp, Cynosurus cristatus
  CDS (1)..(2742)
atggacacctctatacagatggtgctgaacaagaccagcgagctcggcgacgttgcgctgcgggagtaccagcggctgaggaacgtggaccggcaagtgagcgccctccgtaccaagctggaggttttgatggcctgggtggaggtggcggaggagcgtaactggatcacgagggaccaactggtgagtgtgtgggtgaaacagctgcgcagagctgtattcgacgccgaagacatcatcgacgagtacttcacagaggtgtacaagtcgcagcctgaatcaagatctgagacagcaggaggaagacgatggcaatgcatctcctggttgtttcccttatcagaggtcttcttccggtacaatatgtctacacagatcacggaggtccttggccggctagaccatatccagaataacaacttgtccaatatgcagtccagagtggaggctctgccctgcaaagcggcagttcttgatataccaaccagggaaacttttacactgctcccacgtccatggtctgtggttattcctcatggttgtgccggagtcataacccgcctgcttcttgaggacagcgatacgcagggatctgatatcttagtcactggggaaagtggcattgggaagacgacgatggcaagagccgtcctcggcgactgggctgtacgtagacactttgacgtttgcgctttcgcgtgcttgccaccaaaatcaaggttggacatgtacttggatcaaatttgggagcaggctcaagaacaaacacgctgtgactgtccccgaagagaagatgtgaagaaaatgctctccaaaatgaaacttctagtagtgttggatggaatggacagcattgatgagctcatggtcatattaagggggctacctcgtggtgtcaaggggagcaggatcctggtaaccacacagctcgcaacagagaaactcgagcaacacattcatgtcatcacaacggtggagatcaagtgtctccaacgatctgactgcctggaattactttacagtggtctttctggccgctaccgccacgtttttgatgaacatagtgtggagtttggtgacaaaatttatgaaatttcaagaggccttcctcttgccgttgtattgcttggaggacttctctgcttcaacgaccatatgacacaatggaaggaggtgttcagacttctggaatccgatgagcacaacaggctaatcaagcggatactgacagtgagctatgagaccatgccaagcgccattaagctatgttttctgtacttagctgccatacctccgaacgtatatcttaacctccacaaactgaaaaggttgtggtgtgctgagggaatggctgtttcattggaaggtgaacaagacccggattccttggtagatcactatcttgatgttctggtttcacggggccttgtccaattagtggaagctggtaccaagatatgcatccatcaaactgttcacaggtttgcaaagacaaaagcaaatgaggccagccttatggaagatcatagccattttgacatccccggtgcatcagttgttcacgggctttccatccacaactatgttggcaggcaaatgcatacgggcgtcacaaattttcccaagctacgaacattgttttgcgattttgcagaggaatatgttgaccaagcagttactccaccacagagcaaggccagcagctccaatcgcttgaatcggattaatccgtttcagtttctgtgtcattctaggttccttcgagttcttgatgtgaaaggtgtgaagcttggccgcttacctaactgtatcggccatatgattcatctgaggtaccttggccttcgtagctgcagcttaaaaagtctcccagaatctgtggcagagttgatgaacctggagacactggatataactgacaataatatccagacggttgtggatgagttttggaaaattaagaagctgaagcatgtttttgcccaaaatctctccctgccagtgtcagaatcgtccatgagttcgggaacaaatcttgaaactctccatggagtgacgctgtctccagtctggacgcaggagaactgcccactgaagaacctatggaaactcttttctttttccgtggttgatgccacagacgcgaatatgcgagtgttgaaaatggccctaccggaaacaaggggtcttcaattccttcgtcacttgaagatagaaggtgactgctgcatcccacttgtgttcttttccaaatatccagcactatgctccctggaattagatggggtgattttgtcagatgatgtggcagcacagtctattaactcatattatctcagtcaagcttcccgggttgtcctgaggtcaacctttatgtctcagaagttacttgacagatttactgtttactcgttaaccgagctggaattgctagacaactcatttaccgagtcaaagttgttactccagggacatgcatttgaacagcttagcaacctcaagattgggaacctgaaagtactggaggaacttgttattgggaatgcaatgccaaaacttacgacctttgagatgtttggatgccccagcatgaagagattgcaaggcctaaagaattcgagtgaactcaataacgtgacattcttcgacatgccaacgcttgttgcacagatcgaagctgaggacaaagaactctttgataaggtcaagcatgtgagcagtgctgcatgggagagtgcagct

SEQ ID NO: 46 - protein, 914 aa, Cynosurus cristatus
MDTSIQMVLNKTSELGDVALREYQRLRNVDRQVSALRTKLEVLMAWVEVAEERNWITRDQLVSVWVKQLRRAVFDAEDIIDEYFTEVYKSQPESRSETAGGRRWQCISWLFPLSEVFFRYNMSTQITEVLGRLDHIQNNNLSNMQSRVEALPCKAAVLDIPTRETFTLLPRPWSVVIPHGCAGVITRLLLEDSDTQGSDILVTGESGIGKTTMARAVLGDWAVRRHFDVCAFACLPPKSRLDMYLDQIWEQAQEQTRCDCPRREDVKKMLSKMKLLVVLDGMDSIDELMVILRGLPRGVKGSRILVTTQLATEKLEQHIHVITTVEIKCLQRSDCLELLYSGLSGRYRHVFDEHSVEFGDKIYEISRGLPLAVVLLGGLLCFNDHMTQWKEVFRLLESDEHNRLIKRILTVSYETMPSAIKLCFLYLAAIPPNVYLNLHKLKRLWCAEGMAVSLEGEQDPDSLVDHYLDVLVSRGLVQLVEAGTKICIHQTVHRFAKTKANEASLMEDHSHFDIPGASVVHGLSIHNYVGRQMHTGVTNFPKLRTLFCDFAEEYVDQAVTPPQSKASSSNRLNRINPFQFLCHSRFLRVLDVKGVKLGRLPNCIGHMIHLRYLGLRSCSLKSLPESVAELMNLETLDITDNNIQTVVDEFWKIKKLKHVFAQNLSLPVSESSMSSGTNLETLHGVTLSPVWTQENCPLKNLWKLFSFSVVDATDANMRVLKMALPETRGLQFLRHLKIEGDCCIPLVFFSKYPALCSLELDGVILSDDVAAQSINSYYLSQASRVVLRSTFMSQKLLDRFTVYSLTELELLDNSFTESKLLLQGHAFEQLSNLKIGNLKVLEELVIGNAMPKLTTFEMFGCPSMKRLQGLKNSSELNNVTFFDMPTLVAQIEAEDKELFDKVKHVSSAAWESAA

SEQ ID NO: 47 - DNA, 2250 bp, Koeleria macrantha
  CDS (1)..(2250)
atgctcagggagcaactccttgacgtcgacgctgtctctggccgcgccctcgtctccattgtgggcgagagcagcatcggcaagaccacactcgcacggaaggtctaccagagccccgaggtccgcaaccacttcgccatacgcacctggacagtgctccctcccaacagccgtccttccgacgtcctccgcgacatccaccgacaggccagctcccagctccggcggtccgcgtcccatggccaggctgcggaagacggcagcggctgcgatgccggcgccaagggcaaggacatcagcaactctctttttcggaacatgaccggcaggcggtacctcgtcgtggtcgatggcagcattgcagtagccgactggaacagcctccgggcctcgctccctgacgagggcaatggcagcagggtgttgctggtcactgacgcggcggggctggaggtggtgggctacgccggcggcccgacatatgaccccatcgagctgacacggctcagcccagagaacacgtacgagctattccggcgacgggtgttcggtcgccgtggcgactgccctgggcggtacaggtcgaggtactaccaggacgtgttccggatcacccggggcctaccgctatctgtcgtcgtcctcgcgggtgtgctccggtccaaggagctgccggtggagtgggaccaggtgatgacgcagctgctggcggcgagggaccagccccagtgcaagaatggcaacggcgggcggcggatcatgtcgctggtattcgacgacctgccacaccacctcaagtcctgcttcctctacttcgcggcgatgccggagagcgttcccgtggatgccgcgcggcttgtgcgtctgtgggtggctgaggggttcgtgcggccacgacgagggagcaccatggaggaggttggccaagggtacctcaaggagctcatctcccggtgcatggtacagctggtggacaaggacgagttcggcgccgtgacggtggtggtggtgcatgaccgcctccacgcctttgcacaggacgaggcgcaggaggcctgcttcgttgagagccacgacagcactgacgtgctggcccccgccaccgtgcgccgccttgccgtccagaacaccaccgacaagcacgtccaccttggcaacgcgctgcccaagctccgcaccatcgtctgcgacttcgtcaatggcggcactaccaagcccagcgtctgcatccactccactgacctgggcttcctccatgcctccaagttcctccgcgtcatcgacatccatggcctcgagctcaagaaacttccaaacgagattggctcaatgatccacataaggtaccttggcctccagtgtggtcagctggagaagctgccaagcacaataagcaagctagtgaacctgcagtctctgatcctcaagggcaggaacggcgcgttgggcgtgaccgcggcgttctggacgatcccgacgctccggcacgtcgtggcgccattcgcgttgcccaagtgcctgggcaacctgtacagcctccagacgctcctgggcgtgcatccgcattgctgggacacacgcgccggtgcaggcaacccgctggggagggctaccaacctccggtcgctggagctcagcgggctcaccgccgcgcacgccattgcactgacttcggcactggagagcctcgacctgctggtgcacctggtgctgcagggcgagtcactgccgctggccgtgttcaccgtcccgagcctgcggcggcttcagagcctgaggctgctgggatccatggacgaggacgaggaggaggaggctgatgatgtggccgtccggtacatccggccaaatctgacgaggctgtcgatgtggggtacggtggtggggcagagtttcgtggacatgctgggcgagctgccgagccttgcagacctgacgttaatgtggggcgcctacgacggcgaacagctggcgttccaggaaggtgggttcccaagcctgcagaagctgaggctgggcctgccagagctggaggagtggacggtgagcgcagggtctatggcggctctggtgaggctgacgctgctccggtgcaccaacatggagatgctcccggaagcgctggccgggatgaaggagctggaggaggtggtgctgtacagcatgccgaagatggtggggaggatcaaggaggagggaggcgaggatcaccacaagatcaagcatgtccctgtcattcagactatctgg

SEQ ID NO: 48 - protein, 750 aa, Koeleria macrantha
MLREQLLDVDAVSGRALVSIVGESSIGKTTLARKVYQSPEVRNHFAIRTWTVLPPNSRPSDVLRDIHRQASSQLRRSASHGQAAEDGSGCDAGAKGKDISNSLFRNMTGRRYLVVVDGSIAVADWNSLRASLPDEGNGSRVLLVTDAAGLEVVGYAGGPTYDPIELTRLSPENTYELFRRRVFGRRGDCPGRYRSRYYQDVFRITRGLPLSVVVLAGVLRSKELPVEWDQVMTQLLAARDQPQCKNGNGGRRIMSLVFDDLPHHLKSCFLYFAAMPESVPVDAARLVRLWVAEGFVRPRRGSTMEEVGQGYLKELISRCMVQLVDKDEFGAVTVVVVHDRLHAFAQDEAQEACFVESHDSTDVLAPATVRRLAVQNTTDKHVHLGNALPKLRTIVCDFVNGGTTKPSVCIHSTDLGFLHASKFLRVIDIHGLELKKLPNEIGSMIHIRYLGLQCGQLEKLPSTISKLVNLQSLILKGRNGALGVTAAFWTIPTLRHVVAPFALPKCLGNLYSLQTLLGVHPHCWDTRAGAGNPLGRATNLRSLELSGLTAAHAIALTSALESLDLLVHLVLQGESLPLAVFTVPSLRRLQSLRLLGSMDEDEEEEADDVAVRYIRPNLTRLSMWGTVVGQSFVDMLGELPSLADLTLMWGAYDGEQLAFQEGGFPSLQKLRLGLPELEEWTVSAGSMAALVRLTLLRCTNMEMLPEALAGMKELEEVVLYSMPKMVGRIKEEGGEDHHKIKHVPVIQTIW

SEQ ID NO: 49 - DNA, 3069 bp, Koeleria macrantha
  CDS (1)..(3069)
atggagattgccgtggccggagctatcctgaagaccgtcttcgggaagctgttcgaggtcctgggcaaggagtatggaaagcacaagaacctgatgcaagaggtcgagcatatcagcgcagatctcgagatgttcgatgccgccatggccgaccgcgtgcgtgccatttccgcctcgggaccgaggagcgacggctgccgtagcacggccgtggagacgctctacagcgaggagatgctggacctcgcacacgacgtcgaggactgcatcgaccgcttcgtgcaccgcctcttgtgcaagaagattgggacctggccattccgtagcctcacaaaacccgccatctgctccttcttcgccaacgacatccagaagcttcggagtcgcatcaaggaggcgcatcaacgggttatcgatattcctccttctagtacctcgaggaggaggcgtggtgatccttgcgttgcaaggcagcgcgatgtggttggcatcgggaaggccgtggaggagctcgtctctctgcttcatgaggcgaagtgcgagaaagagcagctgcgagtgatctccgttgtggggttcggcggcgtggggaagaccactctcgcgagggcagtttacgacagcccttgcgccaaagagagattcccctgccgtgcttgggttactgctactggtcgctcgtcggagaccgacggcggcggactcatctggatcctacgggagatagtcagtcaagttcttcccagagagaaagatttcatggatgttgacgatggtcaacaatatcttcaagccaagctcaccggctacctccaggaccacaggtacttaattgtcattgatgacgtcaggatggagcaatggagcactctaaattcaatcttgaaagacaacggtaaaggcagcagagtactagtgaccacaactattcagtcagtagcaaacatatgcagccatggcagtggttatgtataccatgtgaagtcacttggcaaagacgagtccaagaagatagctctgccaggggcaccatcacctcagctggagctgagttcggcaatgctgttgcacaagtgtgatggcctcccccttgctcttgtcagtgtctcgaattatttgaaaagctcaagtgaatcaacggtgaaacaatgtggtgagttatgccgcaacttgggttcacacctgaaagaggggaagcatgaccctgacaactttgcagatctgagggaagtgcttctggataactatgagagtctgtcgggctatgctcagacgtgcttgttgtatctgggtgtattccgaaatgaccgtccactgaagaggaaagttgtagtcaggcgttggttagctgaaggatatgcaaggagtgatccttcacgcagcgatgaggacatcgcagaagagaatttcaaggtgcttatagaccggaatatcatccgctccatcgatacaagaaacaatgcgcaggtgaagacatgcagaactcatggcatcatgcacgagttcgtgcttcacaagtccgtgtcgcggagattcatcgcggcaacttcttttgaccgtccaacagcaccctacgatgtcaatgctcgacatctttctatccatggtggcgatgccacatataagcatagtggacgggcatatgacaagaagggactatctcgtgttcggtctgtgacactctctgggaatattaatgcagcagctgatgccatctcttatgtttccatgtgcgaacttctacgcgtcttagatctcgaagaatgcagtgatctggaagatgatcatctcaagcacataggaaagctgctgtatctgagatatctaagcttggggagctccatcaccaagcttcccaagagcatcgttggaaagctgcattgtctcgagacactggacttgaggagaaccaagataaaaacattgcccaggaaagtcatcgagctcccacacttacttcacctgtttgggaggtttatgcttgagaaagatgacctgaagaatgcaagcaagattaggaagctacgcaagttcttgtctgaagagagcaacttgcagactttagcaggattcgacaccgacggggaagaaggattccttcaatttgtgggccaaatgagaaagctcagaaagatgaagatatggtgcaagccctgcgcggatggcagtagcagcaactactggactgacctttccaaggcaattcaggagttcaccaaggttcccatgatgtatgcagggaaccaaggtgctcgttctctctcaattaattccgaagaatgctccggagaatccctcagttcaatcggtttcgagacatgcccagatggcttcctatatgagatgacgtcacttaagctgcaaggggagctactcggaggattgcctccgtttgttaccatgctgtcaggtctcacagagctgtgcatctcatcagccgcagctaccctgacacgagatcttctgtcagcactgctcggacttcgaggcctgctttgcctcaaattgatagcccatcagctcgagagcttcgagatgagaaatggggctctcccaagcctggaacacctttgtatcgtgttgcagagtcgagttccggctctgccgacaatggagcaaggagccgtgccgaatctcgtctcgctccagctgctgtgtccagggctggatggcctttcgggcatgaacatcaggcatctcgaaaggctcaaggaagtcacgatccacgccggtgtgagtgggcgaacacggcaggactgggaaggagcggcaaagaaccacccgaataggcccacactcaaaactgtgggcgaaacccaagaagaagaagcttcttccatgagggagaagaggagaaactgtgagtcaagaaccgatgaccatgatctagattccggtatcaagaagatcaggctttcagtttcggagccgccgcggattcagcaggtggacgcggcgtcatccagctacgtgacttcgcctctccctcgtgaagacctcctgcaatttgccggagccagcctgtgcaatgtctccgcggcacatatggatgaggcgctcgacgcggtg

SEQ ID NO: 50 - protein, 1023 aa, Koeleria macrantha
MEIAVAGAILKTVFGKLFEVLGKEYGKHKNLMQEVEHISADLEMFDAAMADRVRAISASGPRSDGCRSTAVETLYSEEMLDLAHDVEDCIDRFVHRLLCKKIGTWPFRSLTKPAICSFFANDIQKLRSRIKEAHQRVIDIPPSSTSRRRRGDPCVARQRDVVGIGKAVEELVSLLHEAKCEKEQLRVISVVGFGGVGKTTLARAVYDSPCAKERFPCRAWVTATGRSSETDGGGLIWILREIVSQVLPREKDFMDVDDGQQYLQAKLTGYLQDHRYLIVIDDVRMEQWSTLNSILKDNGKGSRVLVTTTIQSVANICSHGSGYVYHVKSLGKDESKKIALPGAPSPQLELSSAMLLHKCDGLPLALVSVSNYLKSSSESTVKQCGELCRNLGSHLKEGKHDPDNFADLREVLLDNYESLSGYAQTCLLYLGVFRNDRPLKRKVVVRRWLAEGYARSDPSRSDEDIAEENFKVLIDRNIIRSIDTRNNAQVKTCRTHGIMHEFVLHKSVSRRFIAATSFDRPTAPYDVNARHLSIHGGDATYKHSGRAYDKKGLSRVRSVTLSGNINAAADAISYVSMCELLRVLDLEECSDLEDDHLKHIGKLLYLRYLSLGSSITKLPKSIVGKLHCLETLDLRRTKIKTLPRKVIELPHLLHLFGRFMLEKDDLKNASKIRKLRKFLSEESNLQTLAGFDTDGEEGFLQFVGQMRKLRKMKIWCKPCADGSSSNYWTDLSKAIQEFTKVPMMYAGNQGARSLSINSEECSGESLSSIGFETCPDGFLYEMTSLKLQGELLGGLPPFVTMLSGLTELCISSAAATLTRDLLSALLGLRGLLCLKLIAHQLESFEMRNGALPSLEHLCIVLQSRVPALPTMEQGAVPNLVSLQLLCPGLDGLSGMNIRHLERLKEVTIHAGVSGRTRQDWEGAAKNHPNRPTLKTVGETQEEEASSMREKRRNCESRTDDHDLDSGIKKIRLSVSEPPRIQQVDAASSSYVTSPLPREDLLQFAGASLCNVSAAHMDEALDAV

SEQ ID NO: 51 - DNA, 1977 bp, Koeleria macrantha
  CDS (1)..(1977)
atggatatagctgaatcatgttcaccaggtcgcactgacatggtacatcacatggaggctctaagggaggctgaatccaagaggttattttttggggaaggagggagagcggatgaccacgagatattgaaaatgtgtggtggcataccattggccataattctcgcggccgcagcctgcaaatacgaagaacttgtggggccaaagatgcctgggaagtctatcttttattcactgaaccaatattccacgtcagaagggacgaaaaagattctgcatatgatttatgctaatctatctgtgcctgtgcggtcttgcttcctgtatctgagtgttttcccagaaggttatactatcaagaaaaatcgtctgatacagctatggggagctgaaggatttatacctgaagaacagttgtggagaacaggggagagctactggaacgagctgatcagcaggagactaattcaaccggtattcaggcacgatgattacgaggcagtgggttgtaccgttcatggcgtgattcttgacttcatcagatccttgtccagagaagagaactttgctacgatggcttcagaattgagttctggttcatttttggttgacaccattcgtcggttctccgtggactgcaatgatgaagacgaagctcttgtcgtggcatcaagcagagtgcacctatcgagcatgagatcactcacactttttcttccctcctacagtccaacagaaaatcttcagaccccttcggttcctgtgaatcttgttccggcttccaagctaatgagagtaatggatcttcttcctgatttcaaactaatgagagtactggatctagaagatactcgaaatttggagaaccggcatctaagtggcattggaggattggttctgcttaggtacttgggaataggaggcaatggtatcgaccagctaccagaagagatcggaaaactgatgcagttggagacactatatttgaggctgagacggttgcctgcatctattgtgaatttggaaaatctgatgcatctacatcttgacatgtatttcacgagtaaagagatgtctgaagaattgcaagaattagacaaagtaacaaacctgctgaggtactggaatcgtctgaggatgcttggtttaaccatggatgcaaggtatctgacaagaactgttccacggagtgtcgcatctttctttgaggaggtttttaggtctaaccttgaatccctgtatcttcattttcctttcggtcctgacgacttgcttccgttactggtggattcatggaagaaggtcactcctccaccatcagcaacaaatgcacgcccaagttttttgcccaggagatttgagctgataatctcaggcatagagctcaatggagtcccaccacaaatggcatcccttttgcacctcacccacctgcgcatcaaactgttttctgtagatgaggaagttctcagaattctcggagggttgccaaagctacttagtctgaacttgacttcagctggtccaccaaagctagggtgcttcatcagggaggatgtttttcagtgcctgaaggcaggctttttcaaaggccagattaggctgtttttccacaaaagagccatgccgcagctccagatgcttagcttccatgcaagtaatggaagtatttattttggtatcgagcagctcctttgcctcaagcgagtccatgccgtcctcaactgcgatggagctacagattccgagatactgaattgggaggctagcatcagaatacaagtagatcggaatcccaataaacccgcactaaaacttatcagaacatacgagaagacgatgagtgtcaacgacctggcatcgtcgggcggcaacactggacacgcagaggacaaggaggaagctgggccgaatccaggatggccaaagaggaggagatgggcccccgggtggcacgctggcgaggagtggagtgcc

SEQ ID NO: 52 - protein, 659 aa, Koeleria macrantha
MDIAESCSPGRTDMVHHMEALREAESKRLFFGEGGRADDHEILKMCGGIPLAIILAAAACKYEELVGPKMPGKSIFYSLNQYSTSEGTKKILHMIYANLSVPVRSCFLYLSVFPEGYTIKKNRLIQLWGAEGFIPEEQLWRTGESYWNELISRRLIQPVFRHDDYEAVGCTVHGVILDFIRSLSREENFATMASELSSGSFLVDTIRRFSVDCNDEDEALVVASSRVHLSSMRSLTLFLPSYSPTENLQTPSVPVNLVPASKLMRVMDLLPDFKLMRVLDLEDTRNLENRHLSGIGGLVLLRYLGIGGNGIDQLPEEIGKLMQLETLYLRLRRLPASIVNLENLMHLHLDMYFTSKEMSEELQELDKVTNLLRYWNRLRMLGLTMDARYLTRTVPRSVASFFEEVFRSNLESLYLHFPFGPDDLLPLLVDSWKKVTPPPSATNARPSFLPRRFELIISGIELNGVPPQMASLLHLTHLRIKLFSVDEEVLRILGGLPKLLSLNLTSAGPPKLGCFIREDVFQCLKAGFFKGQIRLFFHKRAMPQLQMLSFHASNGSIYFGIEQLLCLKRVHAVLNCDGATDSEILNWEASIRIQVDRNPNKPALKLIRTYEKTMSVNDLASSGGNTGHAEDKEEAGPNPGWPKRRRWAPGWHAGEEWSA

SEQ ID NO: 53 - DNA, 2850 bp, Koeleria macrantha
  CDS (1)..(2850)
atgacttcaattgtgcgcctcgttttctctttggtaggcgaggtctgcagcgtcatggagaaagacaaggagcgccgttccgaactctgccgtggcctccgattcatcaaggacgagatggagctggtgattgtctcgatgaaggacaaagacaagcagtaccgaggagctgtgcaggagatctggattcagcggctgctggatttcgcttacgatgttgaagatttcgttgaacctctccgggatccagcagctcttagcatactccgcgttgcctttaggacggacccccgtcctaaacaacttgaaatcataaagcagttcaaggagacaatctcgtctctagcaaaagatttgaagcagagtgctgaatcgagccagggccaagatacagatcagggtgctatgtcagacccggatgaagatgcagaggagcagcttcagagcatcgacgggcccaagagtaaaattgttgagctgctcaagcgctcgccaggcgaagagcagaagctgcgagtgatctccatcgtgggatgccgcggcgtggggaagactgcccttgcaagagcagtacacaacaagtattcctcctctgatgaattcgactgcgtcgcttgggttgtagcttctggatgcaacaagaagaaggctcttctagacaagattctccagagtgtttgtgcggatcttgcaagaagggctcctgatactgaaaatgctcccaaggaagctgaaggcgcttccagttccaccacaaaacgcaatcttcaggacattttgtcccacaagaggtgcttggtctttgttgacgatgtgcagcaagcagaagtgtggaaagatacagtagatgcctgcccaaaaaatggcagcaggagcagaatagttgtgaccactagtgttcgttctgtagccacagcctgcagctctggaagttatgtgtacagaatgcaatgtctcagtaatgatgactcaaaaactttattctggagaaaggtctatggctgtcaaaaggatcctccgtattcactggtaactgattcagaaagcatcttctgtaaatgtggtggtttaccacgggcactgactagtgtagccaaacatttgaatataaaaggagatacgctggatagttctcactgcacagacgtgggacaaaaccttggcaaaaaatatctgtcaggtaacaacaattcagtgggcgtctttaaggaaatgagaagaacacttatgaattgctacgacagcttgcctgactatgaccacagatcctgcatgctttacctaggtatattccctaagggccatgagattaagagcaagaacctaatgagaagattagtggctgaagggttggttggtaaagaaggctctaaatgttttgatgagttgattgaccggtgtatcgttgagccagtgcagatctgcaacaattcggtagttgccaagaggtgccaagttcacggtgtagtgctggagtacatagttcaaaagtcagtagctaaaaatgtggtcactctgattcgaggccgtgagccccaactcaaaggaagcactgaggcacgggtccgccgactctctattcagtctagcacaaaagaaagttttgatgaacttgatgaagacaagtctgctttaaggtcgttaacaatgttcaagactgagcctactgatttaaagatgtgcaagatgctgcggatccttgatcttgaaggttgccatgggcttgaccaggaggggtttcttgaaggcctaagtgaattgctgcttctcaagtacctcaacctcagggatactcgcatcaacaagcttcccacaaaaatagagaaactgcaacatttggagacgctggacatccgagagacaaaggtagaaatattgcccatggaggtcatcatgttgcccaagttggcttatctgtttggcaagtttcaattacctgaggttcccactaaaggaaaagaagcagagaagctttatgagttcctgaaaaagaaaagtgcgctgcacacacttgctggatttgttaccaataagaggcagagtccagaacatgttatacttctcgcaagaaacctgaagaaggttaaagtatggtgcaacgatactcctgctgatgcgccaacgaggttacttcctgatcatcctgaactcgcctcaagcagtgctgctgcttctgatcgttcatcgaggagaagtaacttgtgccctccaaggtctggcaaaacacatctagtgtcacaggatcatgactatatcaagcttctgaagatgcgcggcacccctctagagtctgtatccattacttccagtgcaatttgcaatgagttcttgggctcactagagggtccgtgcaccattagttctatcaaactgcggggtattttgaacagtctgcctgattctaacaagttaagggagctaggtagaattaagaagctgcagctcttctcaactggtctcacaatcaaagatctatcggccttgcaaaatttacgtggcttggaatatctgaagctggtggagcatactgagagattctgcaacggtgttttggttgtggagaagaatggatttgaaagccttaagagcctgtgcattgacgccccagaggttccaaaaatgcaattcaaagaaggatccatgaaaagcctaacatccctttacctcctttgttcaaattctcagaagccatcaggagtcgtcgagggcatgtcacatcttgcaaatctcagtgaagtgatactccatagttcaatgcaacaagcttgggaagcaatggcaaacgggcaccctaaccgcccgagtgtgaagaggcaaccagaaccaactgccaacacacagcagcatatg

SEQ ID NO: 54 - protein, 950 aa, Koeleria macrantha
MTSIVRLVFSLVGEVCSVMEKDKERRSELCRGLRFIKDEMELVIVSMKDKDKQYRGAVQEIWIQRLLDFAYDVEDFVEPLRDPAALSILRVAFRTDPRPKQLEIIKQFKETISSLAKDLKQSAESSQGQDTDQGAMSDPDEDAEEQLQSIDGPKSKIVELLKRSPGEEQKLRVISIVGCRGVGKTALARAVHNKYSSSDEFDCVAWVVASGCNKKKALLDKILQSVCADLARRAPDTENAPKEAEGASSSTTKRNLQDILSHKRCLVFVDDVQQAEVWKDTVDACPKNGSRSRIVVTTSVRSVATACSSGSYVYRMQCLSNDDSKTLFWRKVYGCQKDPPYSLVTDSESIFCKCGGLPRALTSVAKHLNIKGDTLDSSHCTDVGQNLGKKYLSGNNNSVGVFKEMRRTLMNCYDSLPDYDHRSCMLYLGIFPKGHEIKSKNLMRRLVAEGLVGKEGSKCFDELIDRCIVEPVQICNNSVVAKRCQVHGVVLEYIVQKSVAKNVVTLIRGREPQLKGSTEARVRRLSIQSSTKESFDELDEDKSALRSLTMFKTEPTDLKMCKMLRILDLEGCHGLDQEGFLEGLSELLLLKYLNLRDTRINKLPTKIEKLQHLETLDIRETKVEILPMEVIMLPKLAYLFGKFQLPEVPTKGKEAEKLYEFLKKKSALHTLAGFVTNKRQSPEHVILLARNLKKVKVWCNDTPADAPTRLLPDHPELASSSAAASDRSSRRSNLCPPRSGKTHLVSQDHDYIKLLKMRGTPLESVSITSSAICNEFLGSLEGPCTISSIKLRGILNSLPDSNKLRELGRIKKLQLFSTGLTIKDLSALQNLRGLEYLKLVEHTERFCNGVLVVEKNGFESLKSLCIDAPEVPKMQFKEGSMKSLTSLYLLCSNSQKPSGVVEGMSHLANLSEVILHSSMQQAWEAMANGHPNRPSVKRQPEPTANTQQHM

SEQ ID NO: 55 - DNA, 2484 bp, Koeleria macrantha
  CDS (1)..(2484)
atgctgctgcgcgacgagctggagtggctgcaagccatcatccgtgacgccgacaggaagcgccgggccggcaccgacggcttgacccgcgtgtggttgcgccagacgcgcgacgtggccttccaagccgaggacgccgtcgacgatttcttctacaaggtggtcctaaaatttcaagattaccgaagctggaaaacttggcatagatacatggctggctggatgtctcaaatcatcatgcgacatcggttgtctggtcgaatcacaagaatcaagagcagactcgagcaaatctcacagaaccaaaaagaatacaatatcgagcatacacaatcaaggatatggacatcctcggccacagcccttgtcccttgggatgattcgagtgggatgcccatcggcattgaagaagataaggaacgacttatgggtctgctggacgatgctagtcagcatcagaaaatgtacatctccgtattgggggagagtggatctgggaagcaaacactcatcgcctctgtctgccgtgagtatgagaacaagacaccgggttttaaggtcgtctggtacaccatgccgcccgattccagcacacgagatgtcctgaaagaaatcctcaaaatattactacccagacaacagtgggggctacttgatcagatgcagatcaatgacttcgctgacaagctccgtgagttgttgggtggagtcaagtacctggttgttctctctggcatatcctcgaaagccatgctgaaatgcattggggcgacctcgccagatggcaagaacggcagcagggtggtgctcatactggaacgtgacgctcagggcgaggaggtggcggggcacgccgagggcctgaactggaatatcagtaacaacaacaacatcctccggctggaccgctgggacaagaaaagaagctgggatctgttccattccagggtctaccctggagcatgggccgccgggacaagaaaagaaacagaggatactcctcgtataccctggagcatgttccgtccctggggcaaggacgaggtgagaagcgagtacgaagagaaggtgcacgccataacgaggggccatcctcttactctagtggttctggccggactcctacggcacaaggagcagcccgacgagtggaaggccttgattgagcagctgctgaacccagcgagtggcgccgcggccgccgacgaaccagaagaggtggcccagaagctggccgtcatggtcctggcccctcctgcagcagttgcaagtactgcaagccaaccaaagcccatgagaatggccaagcagatggtattctccgcgagctacgatgacctccctcaggacctcaagtcgtgcctcctctatttcgcagcttccgccaagaacatcaccgttgctgctgaagtgatggtgcgtatgtggacggccgaggggttcatcaagccacagaagggcaaaactctcgaggaactgggccatatgcacctcagggacctcatctcccggcacctggttcagaagaagtacgatgatgccggcaacgagacggtcatggttcacggttgcctcctggagttcctgcagtcggaggctcgccaggccagcttcatggaggtccacgacaagaacgacgtccttgcgccggcgtcggtgcgccgcctctccattcagatcgatggcaacggctacacccccttcgacaacaagttccccaagctgcgctccttcatatgccgcgtcgatgacgacgacgacgagcgcaggagtgacatcaacttcctacgcggctccaagctacttcgcttaatctctgtgacggggctgagacttgccaagctgccgagtgggatgggtgaaatgattcacctgcgctacctacgtgttgcttccaaatgcctgcaggagctcccgtccagcatcaaccgcctggtcaacctgcagacgctcgacatcaggtatactcaagtcgagaagatcaaccgaaagttctggacgatcacggcgctgcggcacgtgcttgccaataacctcgagcttccggcggtgtccacgctagtgaaggagctgggtgagctacaaacgctgcatggtgtatccgcccccgatgaagaatggacacaaggtagctgtccattggacaagatgaccaaactccgctccctggagatgaacgggttcaaagccagcaagcacgagcacgcgttccagagcgctctcaagaacatgcatctccttggacacttgaagctgcaaggcgataagatgcctcaccaattgttgctgactgaaccgagccttccgcatcttcatagcatggatctagatggcgacatcacatggcccgtgaacataccggatgaggttcgcaagttccggccgaacctcactgaggtgaaactcggaaaatacagtgatgaggtcaaaaagatcagagatgaaatgaagaagataggtataaacatagattgcatcgatgaa

SEQ ID NO: 56 - protein, 828 aa, Koeleria macrantha
MLLRDELEWLQAIIRDADRKRRAGTDGLTRVWLRQTRDVAFQAEDAVDDFFYKVVLKFQDYRSWKTWHRYMAGWMSQIIMRHRLSGRITRIKSRLEQISQNQKEYNIEHTQSRIWTSSATALVPWDDSSGMPIGIEEDKERLMGLLDDASQHQKMYISVLGESGSGKQTLIASVCREYENKTPGFKVVWYTMPPDSSTRDVLKEILKILLPRQQWGLLDQMQINDFADKLRELLGGVKYLVVLSGISSKAMLKCIGATSPDGKNGSRVVLILERDAQGEEVAGHAEGLNWNISNNNNILRLDRWDKKRSWDLFHSRVYPGAWAAGTRKETEDTPRIPWSMFRPWGKDEVRSEYEEKVHAITRGHPLTLVVLAGLLRHKEQPDEWKALIEQLLNPASGAAAADEPEEVAQKLAVMVLAPPAAVASTASQPKPMRMAKQMVFSASYDDLPQDLKSCLLYFAASAKNITVAAEVMVRMWTAEGFIKPQKGKTLEELGHMHLRDLISRHLVQKKYDDAGNETVMVHGCLLEFLQSEARQASFMEVHDKNDVLAPASVRRLSIQIDGNGYTPFDNKFPKLRSFICRVDDDDDERRSDINFLRGSKLLRLISVTGLRLAKLPSGMGEMIHLRYLRVASKCLQELPSSINRLVNLQTLDIRYTQVEKINRKFWTITALRHVLANNLELPAVSTLVKELGELQTLHGVSAPDEEWTQGSCPLDKMTKLRSLEMNGFKASKHEHAFQSALKNMHLLGHLKLQGDKMPHQLLLTEPSLPHLHSMDLDGDITWPVNIPDEVRKFRPNLTEVKLGKYSDEVKKIRDEMKKIGINIDCIDE

SEQ ID NO: 57 - DNA, 3171 bp, Koeleria macrantha
  CDS (1)..(3171)
atgggcaggttacggtccactgtgtggagggaattcaaaatcctagaatccgaacaaaatggagcacctatcagagcaaaatgtaaacactgtaaaacagagctcggatgcccaaccacccaggggactggagttctgcagcgtcatctcaggagcaaagcttgtctttacaagaaatgtgaaggaagtgaccctttaagctcccctgatgctattacaaattctgcgcctgttgcaactggaaatttatcgagcaaaaaaagaaaaagagatgaggagtcgacaggcctcagaacagctaacacaaacgggtggaacaaggatgacttctccaagatgatacaggatataactcgtcagttgcaccatatccgagaaggtgtgattcgggtcctcagtatacttgggtcagattttgctccaagtttgaatcacagtcagggtacaacctcacatcaacgccgaagaacaacgggcacccttcaaggcagagtgtatgggagagatattgagaaaaacaacatcatagagttgatggaagaagaaaaaattgctactcgtgcaactgtcctgcctattcttggaattgcaggagttgggaagacaactcttgctcaacttgtgtacaaccatccagctttgaaagatcaatttgaccacatggtatggatttgggtatctaacaactttgatgcaatggaactcacgaaagacatgctaggttctgtatcccaagagacacatgtagggctatgcaactttgccaagcttcaggagatcttggagagtcatattaaatcaaagagggttctacttgtcctagatgatgtttgggatggcatcaacgattaccagtggaaccagctattggctcctttcaagtctgacgatgggaggggcaatatgataattttgacaactagaaaaccatgtgttgcaagaaggagaggaactgtaacacctattacattaggtgctctgaaaagtgatgatttctggtcactttttgaagcatgtgcatttggggacatgaaccatgataaggaagaaagtctaagcaacttaggacagcaaatagcacagaagttaaagggcaatccattagcagcagaaacagcaggggcactattaagcgaacatcgtactgttgctcattggagtagcgttctaaagaacgaggactggaaatctttgacactcagtggaggcatcatgtcagctttgaagctttgctatgatcagctgccctaccatttacaaaaatgcttctcgtattgttctttattcccctgcaactatgaatttcctgcggaagagctagtttgtatttggatttcacagggatttgtgaagtgtaacaattcaagtaagagattggaggagatcggacaggactatctggctgacctggtgaacctgggcttctttgagcagtttgaacaagaatcatcttcgggctgtactcaaatttgctatgttatgtataatcttatgcatgattttgccagagtagtttcaagaactgagtgtgcaactattgatggtctacaatgcaacagagtgtttccaactgtacgccatttgtctataataagcaattctatatatcagttgaaagatctgacagggaacatagctcgtattgagaaatttgaagaagtattgcgaaatactgtcacatcagtggggaaattgaggtcattggtgttgattgggtgttatggctcttccttcttccaattcttccagactgcattccgaaaggcacgtaatttgcgcctgctgcatgtgtctgtaacatccgctgattcttgttcctccctgtgcaatttggtaaatcctgcacatcttcggtatctgaaacttgataatggtcatactgagcagggggctttgtcacaagttttgagcaagtcattccaccttcaagtattggatgttaaccaatacagtggtgcttggcttgcctctttgcagacggttcacctagataattctggagaaccgcgaatactcccttctctgggaaggcttcggtgtctgagaagattgaaattgagcagtatgcggcacgtaagagaagtatctattccatcattggaggagctggttatatttgaaatgccagagttgaagacatgttcctgtacttctgtgggggatctcatgtctagtttaagggtgctggagatccagagttgccctgcccttgaggtttttgatctgtttcagaatgttcataaatccgaaactgagcataactcatggttgccaagtctgaagaaactcattatccgcgactgtcctaattggcatgtaatgatccctctttcgccttcagccacagttttagagattgagggatcatccagccaaacattaagaattaagccaaacagtgttttgggtgagtctccatgtgagatgacactggatgacaagtttttgtcattccataatatgagggacctcaagtacttggaaataaaggactgctgcaatctagtgtctattttattaaaaacttttggtcatctcatatctttgaagagtttgaaaatgaagaactgcaaagaacttctctcttcagatcaagacttgataccttcaaatgacagtgctctctcgtctcttgagagtcttagtattacaaaatgtgtaataatagggaagtggttctctgtgatgctaagggactcgccaacgctgaagaaattgtatttagatgactgtccacagctgacacagtattcatttttgaatagtcagctccctggtttggaaagtcttcatatcggtgagttgtctctccttacgtcgtcattctacgagggccttagctcccttcgaagcctaagtcttcaatatttgaaagagccaagactaacgtatgagcaagagagagcacttatgctccataggtccctgcaagtgctcctattcttttgttcttcgaaactcttagatcttcctgcggtgctgcacagccttccttcccttaagaccttgaagatcaatgattgtaagggcatctcaaggttgccgaaggagagcctcccaccttcgctggaagagctcgagattgaaagttgcagctacgatctatcagcacaatgcagatcgctagcaacgggcaggctaagggtcaaaattgatgggcactatgtgaac

SEQ ID NO: 58 - protein, 1057 aa, Koeleria macrantha
MGRLRSTVWREFKILESEQNGAPIRAKCKHCKTELGCPTTQGTGVLQRHLRSKACLYKKCEGSDPLSSPDAITNSAPVATGNLSSKKRKRDEESTGLRTANTNGWNKDDFSKMIQDITRQLHHIREGVIRVLSILGSDFAPSLNHSQGTTSHQRRRTTGTLQGRVYGRDIEKNNIIELMEEEKIATRATVLPILGIAGVGKTTLAQLVYNHPALKDQFDHMVWIWVSNNFDAMELTKDMLGSVSQETHVGLCNFAKLQEILESHIKSKRVLLVLDDVWDGINDYQWNQLLAPFKSDDGRGNMIILTTRKPCVARRRGTVTPITLGALKSDDFWSLFEACAFGDMNHDKEESLSNLGQQIAQKLKGNPLAAETAGALLSEHRTVAHWSSVLKNEDWKSLTLSGGIMSALKLCYDQLPYHLQKCFSYCSLFPCNYEFPAEELVCIWISQGFVKCNNSSKRLEEIGQDYLADLVNLGFFEQFEQESSSGCTQICYVMYNLMHDFARVVSRTECATIDGLQCNRVFPTVRHLSIISNSIYQLKDLTGNIARIEKFEEVLRNTVTSVGKLRSLVLIGCYGSSFFQFFQTAFRKARNLRLLHVSVTSADSCSSLCNLVNPAHLRYLKLDNGHTEQGALSQVLSKSFHLQVLDVNQYSGAWLASLQTVHLDNSGEPRILPSLGRLRCLRRLKLSSMRHVREVSIPSLEELVIFEMPELKTCSCTSVGDLMSSLRVLEIQSCPALEVFDLFQNVHKSETEHNSWLPSLKKLIIRDCPNWHVMIPLSPSATVLEIEGSSSQTLRIKPNSVLGESPCEMTLDDKFLSFHNMRDLKYLEIKDCCNLVSILLKTFGHLISLKSLKMKNCKELLSSDQDLIPSNDSALSSLESLSITKCVIIGKWFSVMLRDSPTLKKLYLDDCPQLTQYSFLNSQLPGLESLHIGELSLLTSSFYEGLSSLRSLSLQYLKEPRLTYEQERALMLHRSLQVLLFFCSSKLLDLPAVLHSLPSLKTLKINDCKGISRLPKESLPPSLEELEIESCSYDLSAQCRSLATGRLRVKIDGHYVN

SEQ ID NO: 59 - DNA, 2148 bp, Koeleria macrantha
  CDS (1)..(2148)
atggagcatgctgttgttagcgctggtgggggcgctgtcgacatactgttgtgtaagctgggaacggtgatcatccaagaagcacagctccttggaggcatccgaggtgaactgcaattcatgaaagatgagctggagagcatgacagcgttcctgcaagaccttgctgagaaggaaaatagcaggaagcaggttaagatttggatgaaacaggtacgagaggtcgcatatgatgttgaagattgcatcgatgagttcacgtatcaccttggaagcagcacgagtggttctggtcttgccgagctcttccacagatgcatccgtctcctgcaaactgccatggtgcggcatcagattgcaaaacaaatccaagaactgaaagtgcgtgcaacaagtattagcgaccgaaacttaaggtatggtggtaaccatctcatttccagagcagaaggtaacacatttgctccacaaccagcaccatccagtattatttctctggatattcgtactcccgcactcttcccagagataacaaaacttgtgggcgttgaagtgcgtcagagtaatcttgttaatttgttggtggttgaagacgtgccacaattaatggtggtatctatatttgggtttggtggcttgggcaagacaactcttgctatgacaatatatcaaacagcaagtgcaagcttccaatgtcgagcttttgtaactgtatcccagaaatttgatatcaaggctctcataagggacattcttcgacagactattcagccagtagatcgaaatggtccagtacccacagtggacccactcaaaggcatggaagaatggaacgtgggacaacttgcagatatgctaaggcagcatctagaagataaaaggtatcttattgttcttgataatatttgggccatctcagcttgggaaggtattcgattttctctgcctaactcacatactggaagcagaataattgttaccacaaaaatgaaaactgtagcacaagcctgctgcctccatgagtatgacagagcttacgaaattgaaccactcactggtggtgaatctagcgtgttatttttcaagagaatattcggtaacaaggaaaattgcccatctgtcttgaaaaatatttcagaaaagatcctggggaaatgtgggggtatacccttggccatagtcagcattgcaggtcttctggctagcacgtccgtgcacagttatgatcgttgggagaagatctacagctctcttggcttggagctggaaaccagtccctggctagaaaaactgaagaatattcttgagcttagttataatgaccttccgtaccatctaaaaacctgtttcttatatttaagcacttaccctgaggatcataaggtcagaaggaaaagtttattgagacgatggacagcagaacgctttgtgactgcgaagcgtggattgagtgccttagaggtggctgagaactatttcaatgaattactcaacaggagtgttgttcatctagttgaaatgagctttgatgggaaggtcaagactttccgagttcatgatataatgctggagatcattgtttcaaaatcaattgaggacaatttcatcactttggtaggtgaacagcatactttagctccacaagagaagattcggcggctatccattcatggtggaagtaacagaaatattgccacaagcaaaatgttaatccatgtccgatcattgagtatatttgctgacggagaaatgttacagtttgcttgggtaaaacttcttagaatattagacctagaaggttgtggatttgtcaggaatgaagatatcagaaatatatgtagactgtttcagttggaatatgtcagtctcagaaatacgtatgtcactcagttccctgtgcagatagggaacctgaagaagttggcgacactagatgtccgggacacaggtataaagtatctacctcctcacattaccaagctgccaaatttatcaaacctacttggagggagaagagtttataaccacagtggtttatatcctatttccgagttctggggaatgcacatccctaagaagcttggcaatttagaaactcttacgacccttgcacaagtagagatcacactttacttcccattgcgtatc

SEQ ID NO: 60 - protein, 716 aa, Koeleria macrantha
MEHAVVSAGGGAVDILLCKLGTVIIQEAQLLGGIRGELQFMKDELESMTAFLQDLAEKENSRKQVKIWMKQVREVAYDVEDCIDEFTYHLGSSTSGSGLAELFHRCIRLLQTAMVRHQIAKQIQELKVRATSISDRNLRYGGNHLISRAEGNTFAPQPAPSSIISLDIRTPALFPEITKLVGVEVRQSNLVNLLVVEDVPQLMVVSIFGFGGLGKTTLAMTIYQTASASFQCRAFVTVSQKFDIKALIRDILRQTIQPVDRNGPVPTVDPLKGMEEWNVGQLADMLRQHLEDKRYLIVLDNIWAISAWEGIRFSLPNSHTGSRIIVTTKMKTVAQACCLHEYDRAYEIEPLTGGESSVLFFKRIFGNKENCPSVLKNISEKILGKCGGIPLAIVSIAGLLASTSVHSYDRWEKIYSSLGLELETSPWLEKLKNILELSYNDLPYHLKTCFLYLSTYPEDHKVRRKSLLRRWTAERFVTAKRGLSALEVAENYFNELLNRSVVHLVEMSFDGKVKTFRVHDIMLEIIVSKSIEDNFITLVGEQHTLAPQEKIRRLSIHGGSNRNIATSKMLIHVRSLSIFADGEMLQFAWVKLLRILDLEGCGFVRNEDIRNICRLFQLEYVSLRNTYVTQFPVQIGNLKKLATLDVRDTGIKYLPPHITKLPNLSNLLGGRRVYNHSGLYPISEFWGMHIPKKLGNLETLTTLAQVEITLYFPLRI

SEQ ID NO: 61 - DNA, 2169 bp, Koeleria macrantha
  CDS (1)..(2169)
atggtcaaaaaaactcgcaatgttatctccatccatggtatgggtgggataggaaaaacgactcttgctcgttctatctacaaaaataaagaaattgaaaatgcgtttgattgtattgcatggatcacaatctcccaaaactataaggttgaagatttattgagaggaatacttagacaggtcttgggaaagaaagagaaaatccctgctcagactgatacaataagcctggttggtaagctaagaagttacctggagggaaaacgatacttggttttcttggatgacatgtggaagcaagatgcttggacagtacttgactgtgcacttgctaacaacaataaaggaagcagagttctgattacaactagaattgaaggtgttgcatccatagcaaacaatgggtgttgcattgtgccaaagaaactgccattggaaaatgcatgggaactcttctgtcagaaagcgtttcagaagatcgatgggaaaagatgtccagtagccctgatcccttgggcagaaaaaattgttgaaagatgtgatggattgccccttgctattgttgccattggaagcctcctgtcctacaagaaaatagatgagaaggaatgggagatgttctacagtcagcttagttggtatataactaaggaccaaggactgaaccacctcacaagtattctcagtctcagcatcagtaacttaccggcaaatctaaaaaattgcttcatgtattgtagcatgttccctgaagattatgtgatcagaaggaaacggataattcgattatggattgctgaagggtatgttgaggaaagaggagaaggtattactaaagaggaagttgctgatgagtatcttaaagaccttgttaatcgttcacttcttcaagttgtacagatgaacttgagtggaagacctaatggattccagatgcacgatctagtaagagagataactgtagcaaagtgcaaaagtgagagattctctcttcttgcagaagatccccgtatgataagacttggtgatgaagctcgtcgagtttctgtgctgaagggtgcagatgctgtggaatcggttgtaggtgcaaaaaaaatccggtcctttattgtgtttgacgaggaagtgacaagtgtatggattaagagtgctgttgcaaatttcagattgctaacggttttgtccctgcgagatgcaaacattgagaagctcccggatagtgtaatggatctcttcaatttgagctatcttgatttacgtggttcaaaagttaaagtcatccacaagtcaatcggtaggctgaggaaactgcaggtcttggatcttacacacacgcctgcaaaggaattgcccgctgaaataatgatgctaacgaagctgcgactcctaagagttggtggtttctatgacttcgttggtgtaaatagggcctttctcctgaatcgaccagcaagaatatgttctcgaattgatcgtctaaatgatttacaggtattgggagagatattaccaagtgaagatgtagttgctaatctgggaaggttgacacaactgcgtaattttgcgatacatattgagaaggtagaatatgtggacaaattatgcacagccctcagaagtatgccaaaccttgttttcttggttataatattgtccgtcgaagatcatgtgcttaacctgcaacacttggatcatgtcccaagtttgagattgctccagttacgcggggcgttgcatggcggggttgttccggcagtactacgccgtttcagcaatcttacaaccttgcaattagagtggtccaggctgcaagaggatccccttccttccatctcatgcatgtcaaatctacacaaactttttcttgaaaatgcctatgacggacagttgctgaccttcagagcaggatggttccccatgctcaaggaattactcttgattaacatggagaatctcagccttattgaaatggaggctggcacgatggcaaacctggtttatgtagcacttgctagtttgagaagtatgcacaatattccaccagggttacaacatataacctcactccaaaagttaatttttcgggacgtgccaggagaacttcttagaagggcaaagggagaggaccgactctacattcaacacatacgttacgtacatctcgtgaca

SEQ ID NO: 62 - protein, 723 aa, Koeleria macrantha
MVKKTRNVISIHGMGGIGKTTLARSIYKNKEIENAFDCIAWITISQNYKVEDLLRGILRQVLGKKEKIPAQTDTISLVGKLRSYLEGKRYLVFLDDMWKQDAWTVLDCALANNNKGSRVLITTRIEGVASIANNGCCIVPKKLPLENAWELFCQKAFQKIDGKRCPVALIPWAEKIVERCDGLPLAIVAIGSLLSYKKIDEKEWEMFYSQLSWYITKDQGLNHLTSILSLSISNLPANLKNCFMYCSMFPEDYVIRRKRIIRLWIAEGYVEERGEGITKEEVADEYLKDLVNRSLLQVVQMNLSGRPNGFQMHDLVREITVAKCKSERFSLLAEDPRMIRLGDEARRVSVLKGADAVESVVGAKKIRSFIVFDEEVTSVWIKSAVANFRLLTVLSLRDANIEKLPDSVMDLFNLSYLDLRGSKVKVIHKSIGRLRKLQVLDLTHTPAKELPAEIMMLTKLRLLRVGGFYDFVGVNRAFLLNRPARICSRIDRLNDLQVLGEILPSEDVVANLGRLTQLRNFAIHIEKVEYVDKLCTALRSMPNLVFLVIILSVEDHVLNLQHLDHVPSLRLLQLRGALHGGVVPAVLRRFSNLTTLQLEWSRLQEDPLPSISCMSNLHKLFLENAYDGQLLTFRAGWFPMLKELLLINMENLSLIEMEAGTMANLVYVALASLRSMHNIPPGLQHITSLQKLIFRDVPGELLRRAKGEDRLYIQHIRYVHLVT

SEQ ID NO: 63 - DNA, 2067 bp, Koeleria macrantha
  CDS (1)..(2067)
atgacgaatattttgagttctatattatcacaactccacaaacgagattatgttcatgctggagcaggggatccacaactcctcatcaaccaaattagaaatttcttggaagatagaaggtactttatcatgattgatgatatatgggattcacagacatggaaaactttggattgtgctttatttaagaataagcatggcagtgtaataatgaccacaacacgtatacatgatgttgctaaattatgctgctcttcttccggggatcttgtgtacaaaatcaaaccacttggtgcttctgactcgaagaagttatttttcaagagaatatttggttgtgaagaaaaatgctctccaaacttgaaagaagtctctgaagatattttaaaaaaatgtggtggtttaccactggcaatcctcgctatatctagtttgttggctaccggtaaaacaaaagaagagtgggagcgtgtgcgaacttctattggttttgcgcaaagcagaaattctgatgtggattccctgaattacatattatctttgagctactttgaccttcccctccatctaagaagttgcctattgtacttgactatgtttcctgaagattatctgattagcagagagcggttagtacaccgatggattgccgagggtttcatccacggcgaagatggagatcttgttgaaattggagaaaagtatttccatgatcttgttaacagaagtttgatacagccagtgggcattgggtatgatagtaaggcatcactttgccgagtccatgacactgtccttgattttctcatttacaagtctatggaagagaacttcagtactttgttaagcaatcatccaaagtcagatatcagagttcgccggctcactctgattggaaatgaggatcaaggaagtgtcgagcaattgtatttatcacattgtcgatccctctttgcttttgggtattctcggaaatattttcctatacttgcaaagtcaaatgctctgcgtttgctggatctacaaggttgtcgtgctctggtaaatcatcatgtcagagatattggagaacttttccagctgaggtacttgaatatctcagggacaggtataactgagcttccccaaaaaattggagagttgaagcatctagaaacgctagatgcatcagtcacaggattagttgagctgcctggatcagttactcagctaaaacgactggcacgtctgtttgttcctggtaaaactaaactgcctgatgggatcgggaacatggagagcttgcaagagctctgggatataaaacccttcaagcaatctctgaactttctggtagaacttgccaaactaacaaatttgagaaacttgagaattacttgggactcgcgcgaatttgacaacgcaagttacaagggacaagagctggtgtcctcccttagtaaactggacacatgcaacctttgcaaccttcgcattgaattttatttgacagaaaaggatccaatcttgattggccattcattcctccctgctctaagtagcgtccgagagatttatctctgcagtgggcaactccggtggattgccaaatggatattttcatttgccagcctagaaagattacacatcatcggtgacacggagataaaacagcaggatcttgagatggttggaagagtacctaatctcctcgaatttgagctgcggtactgtcgttgtgtagggcccatcgtcatcaccagtggaggattccagcagttacagaagcttggtttctactatagttatgcacagctgatgtttgaagcaggagctatgccgaaccttaagaagcttgactttagtattcacctaaagaagttcaaatctggtggtggtgcttttgattatattggcctccagcacctattcagccttaactcggtccatgtcaccataagctgcgatggtgccagggctgcatatgttgagtccactgaacgcgctttcaataacatggctgagaaaaaccccaaccgtcccacattggaaattacaagacaattaactgaagacatgttacaagat

SEQ ID NO: 64 - protein, 689 aa, Koeleria macrantha
MTNILSSILSQLHKRDYVHAGAGDPQLLINQIRNFLEDRRYFIMIDDIWDSQTWKTLDCALFKNKHGSVIMTTTRIHDVAKLCCSSSGDLVYKIKPLGASDSKKLFFKRIFGCEEKCSPNLKEVSEDILKKCGGLPLAILAISSLLATGKTKEEWERVRTSIGFAQSRNSDVDSLNYILSLSYFDLPLHLRSCLLYLTMFPEDYLISRERLVHRWIAEGFIHGEDGDLVEIGEKYFHDLVNRSLIQPVGIGYDSKASLCRVHDTVLDFLIYKSMEENFSTLLSNHPKSDIRVRRLTLIGNEDQGSVEQLYLSHCRSLFAFGYSRKYFPILAKSNALRLLDLQGCRALVNHHVRDIGELFQLRYLNISGTGITELPQKIGELKHLETLDASVTGLVELPGSVTQLKRLARLFVPGKTKLPDGIGNMESLQELWDIKPFKQSLNFLVELAKLTNLRNLRITWDSREFDNASYKGQELVSSLSKLDTCNLCNLRIEFYLTEKDPILIGHSFLPALSSVREIYLCSGQLRWIAKWIFSFASLERLHIIGDTEIKQQDLEMVGRVPNLLEFELRYCRCVGPIVITSGGFQQLQKLGFYYSYAQLMFEAGAMPNLKKLDFSIHLKKFKSGGGAFDYIGLQHLFSLNSVHVTISCDGARAAYVESTERAFNNMAEKNPNRPTLEITRQLTEDMLQD

SEQ ID NO: 65 - DNA, 3855 bp, Koeleria macrantha
  CDS (1)..(3855)
atgagcggagtcgagggtgtgattgcaagtgccgtggggaaacagctcatccgcaagcttggtaaattcgctgcggaggagatctctctgcaatggaggtacagagagaacgtgctggacatggaggagaagatgaaagatgtggaggccgtgttgcttgatgccgacaacaagtcgcgtcaaggaggagaaagtggaaaagtatttcagcgttggcttacaaaattcaagcgtgttgcctacaacgccgaggatgtgcttgatgagttggaagctaaggagctcatcaacaagagccaatctaaggtgaacttatggttttccagaaacaatcaactcctgcatcgaataaccatgccccacaagattaagaacgttatgaagaaaatagacgaagttgaaaaggagggcagtaggaggcttaatcttgtgcgtcaagaatcaagcgtagaagggagaagaaacaatgaaacttatgcagcacacaatggtgatgggttgaaaactggaatggtggggagggatattgagaaggagaagataatcagcctgctactgacaagtgaagctcaccaggatatctccatcattccagtagttggcattggtggcataggcaaaacaacattggctgaatcagttcgtgcagacaagagggtcagtgtctttgacctctcggtctgtgttaatgtgtccaagcttgacttggacaaaattgcgactgtcatcctgaaaagcatgaatatcaatatcgaccttgccaactgcgatgtgcagtttcagctgaaaaaagaacttgctactagaagatacttgattgttctggatgatctctgggaagaagatggaaataaacttgaaaagttgaaggagatgttacaacatggtcgtaaggctagctgtataatagtaactacccgtaacttaagcgtagtgcaaaaattgcgaactggttttcttgcaaatgagagaaaaatttgcccagttcttgagtctgaaaaaatcagtttgggtggtttatcacctggtaactgttgggaattaatgaagcggagagcatttgggcccgatgatgaccatagtgatttggaagaaatcggaaggcagatctccgagagatgttggggttcaccgcttgtggcaaatgctcttgggcaagtaatgtcggatccaaggaccttgagggcttgggaagagataagagacaccaaggttgatttgggtttgagagaaaaacatcagaaagaaacattagacaggctaatgttgagctattactatatgccatcagaattcaaaatgtgttttgcgtatttggcagccttccccaagggcttttcaatggacagcaatcgtctaatccagcaatgggatgcacttagatacattgattatccagggcatgatggtgaaaggtgcatcaactaccttttggggatgtcctttcttcggattcaagggtccgcttcggttagttcaagtccattgcaattcaaagtacctgcagaactcgtcatgcatgatttggcgcatgatcttgcatcaataattgctgccgatgaatacattgatcttgacgctactaaaagcaccagctggaacagagctcggtactgccgacatgcgcagttaaccaacttcaacaatgatcctaaggttttcaaaaaactaccacacaaaattagatcgctccactttagggattccaaggggctgcaactcccgaaaaaggcattttctcgacccaagtacattcgtgtcttggacctatattcagctaaaggtcaatctgctccaagtagcgtggtgctgccatcttccgttaatcgattgattctgattaggtatctcgatgccacaggcttgccaataacatcacttcctaagcattttaatgcactccaaaacttggaaactcttattctgtccaattccttgcttgaaaccttgcctgacagtatttgtcgcctcagcaaactatgctatttggacatatctggcagtggcagccttactaagttacctgcatcgctagggcatctctctcaactctttttcctcaatctaagcaggtgttccgtactccaggagttgcctgaatcaatctgtgagctcacacgcttataccacctagacatgtcagattgttgtgctcttcaaaagctccctgatgaatttggtagcctaaaactctcattcttaaacttgtcaagttgttcaaagctcactaaactacctgaccatattagctttccgtgtttggagcatctgaacctatcaagttgccatgagctagagaacctgccaattaattttggccaccttcagaaacttgggttcgcaaacctctctggttgctacaaggtttcagtgcttccagaatcattttgcgaactaaaaaaattgaaacacctagatctttcagattgtcataacctcaaacaactccctgaatgttttggtcacctcctggagcttagttatttgaacctaacaagttgtgctaagctcgagcgtttgccagattcaatatgcaagatgtttcagttgaggtgtctctatttgtcattttgtctggggctccgtgcactccacccatcatttggtgatcttaagcttcaaatactgcatgtggatggccttatatatatgagttacttccctgagagcattggtgacatgactagcctaacccagcttgtgtgcgatttcaaccgtactgagttgagtgaaaaggttgaagccattcgaaaccgtctaaaacttgtgggcagagcattccatcgtgtacatcagatagaaagtagaggatgcagcagtatagtggatcttgtggaattgacttgttcagagctgatactttcaggccttcagaatgtcaggcgtccggaagatgcagacagagtcaaactgcatgaaaaatcagatattcgagtactacaacttagctgggataatgaaggaggtaaatccgtgttggacaggctcataccacctcggactcttgaacactttatcctagatgggtataggagcaaggacttccctaactggatgtctcacatctcatcccaccttcctttaatcagcgaattgactctttatggtttggaagtatgtgattgtctacctccatttggggcacttccaaatttaagaaagctgtttctgaagaacattcccaaccttaggaatatcggtaaggagttctatggaaaaggcggaccttgtatgaaactaagagtactgctattgtactcgatggagaatttgttggaatggtggacaacagagtcaagtaaagaaaatgaagagtttctgatccctagtttgcatcatttgggggtaattgactgcccaaagttgaagttcctaccatatccaccaagaagtatgatttgggtattgaaaaacagcgactcagttttgccagaacgtggattcggaaacctctcgtcttccatcagtccttcttcgatgcttctgaatagttgtagtttctctcaagacaagtgggatagacttcaacacttaccgacccttgagatatttcactctgtgtgtgtcagcttgaggacattgccagaggccatgcgatgcttgacagctcttaaaatactgatgttgcaagagtgtgaagccctggagactttaccggggtggttgggacagttgacttgcctagaagaaattggcatctgggattgccccaaactgacatctttgcctgaaagcatacggagtctctctgctttgaaggcactccacattgctagatgtccaagtctgattgcgaggtgccaaggggaagatgcacacaagatttctcacatcccgacagttgaattcgagtga

SEQ ID NO: 66 - protein, 1284 aa, Koeleria macrantha
MSGVEGVIASAVGKQLIRKLGKFAAEEISLQWRYRENVLDMEEKMKDVEAVLLDADNKSRQGGESGKVFQRWLTKFKRVAYNAEDVLDELEAKELINKSQSKVNLWFSRNNQLLHRITMPHKIKNVMKKIDEVEKEGSRRLNLVRQESSVEGRRNNETYAAHNGDGLKTGMVGRDIEKEKIISLLLTSEAHQDISIIPVVGIGGIGKTTLAESVRADKRVSVFDLSVCVNVSKLDLDKIATVILKSMNINIDLANCDVQFQLKKELATRRYLIVLDDLWEEDGNKLEKLKEMLQHGRKASCIIVTTRNLSVVQKLRTGFLANERKICPVLESEKISLGGLSPGNCWELMKRRAFGPDDDHSDLEEIGRQISERCWGSPLVANALGQVMSDPRTLRAWEEIRDTKVDLGLREKHQKETLDRLMLSYYYMPSEFKMCFAYLAAFPKGFSMDSNRLIQQWDALRYIDYPGHDGERCINYLLGMSFLRIQGSASVSSSPLQFKVPAELVMHDLAHDLASIIAADEYIDLDATKSTSWNRARYCRHAQLTNFNNDPKVFKKLPHKIRSLHFRDSKGLQLPKKAFSRPKYIRVLDLYSAKGQSAPSSVVLPSSVNRLILIRYLDATGLPITSLPKHFNALQNLETLILSNSLLETLPDSICRLSKLCYLDISGSGSLTKLPASLGHLSQLFFLNLSRCSVLQELPESICELTRLYHLDMSDCCALQKLPDEFGSLKLSFLNLSSCSKLTKLPDHISFPCLEHLNLSSCHELENLPINFGHLQKLGFANLSGCYKVSVLPESFCELKKLKHLDLSDCHNLKQLPECFGHLLELSYLNLTSCAKLERLPDSICKMFQLRCLYLSFCLGLRALHPSFGDLKLQILHVDGLIYMSYFPESIGDMTSLTQLVCDFNRTELSEKVEAIRNRLKLVGRAFHRVHQIESRGCSSIVDLVELTCSELILSGLQNVRRPEDADRVKLHEKSDIRVLQLSWDNEGGKSVLDRLIPPRTLEHFILDGYRSKDFPNWMSHISSHLPLISELTLYGLEVCDCLPPFGALPNLRKLFLKNIPNLRNIGKEFYGKGGPCMKLRVLLLYSMENLLEWWTTESSKENEEFLIPSLHHLGVIDCPKLKFLPYPPRSMIWVLKNSDSVLPERGFGNLSSSISPSSMLLNSCSFSQDKWDRLQHLPTLEIFHSVCVSLRTLPEAMRCLTALKILMLQECEALETLPGWLGQLTCLEEIGIWDCPKLTSLPESIRSLSALKALHIARCPSLIARCQGEDAHKISHIPTVEFE

SEQ ID NO: 67 - DNA, 2883 bp, Koeleria macrantha
  CDS (1)..(2883)
atggagcatgctgttgttagcgctggtgggggtgctgtcgacatactgttgtgtaagctgggaacggtgctcatccaagaagcacagctccttggaggcatccgaggtgaactgcaatacatgaaagatgagctggagagcatgacagcgtttctccaagaccttgctgagaaggaaaatcgcaggaagcaggttaagatttggatgaaacaggtgcgagagctcgcgtatgatgttgaagattgcgtcgatgtgtttacgtatcaccttggaagcagcacgagtggttctggtcttgccgagctcttccacagatgcatccgtctcctgcaaactgccatggtgcggcgtcagattgcaaaacaattccaagaactgaaagtgcgtgcgacaagtattagcgaccgaaacttaaggtatggtggtaaccatctcatttccggagcagaagggaacacatttgctccacaaccagcaccatctagtattatttctctggatattcgtactcccgcactcttcccagagataacaaaacttgtgggcgttgaagttcgtcagagtaatcttgttaattggttggtggttgaagacgtgccacaattaatggtggtatcgatatttgggtttggtggtttgggcaagacaactcttgctatgacgacatatcaaacagcaagtgcaagcttccaatgtcgagctttcgtaactgtatcccagaaatttgatgtcaaggctctcataagggacattcttcgacagactattcagccagtagatcgaaatggtccaacacccacagtggacccactcaaaggcatggaagaatggaacgtgggacaacttgcaagtatgctaaggcagcatctagaagataaaaggtatcttattgttcttgatgatgtttggaccatctcagcttgggaaggtattcgattttctctgcctaactcacatactggaagcagaataattgttaccacaagaatgaaaactgtagcacaagcctgctgcctccacgagtatgacagagcttacgaaattgaaccactcacaggtggtgaatctagcgagttatttttcaagagaatattcggtaacagggaaaattgcccatctgtcttggaaaacatttcagaaaagatcctggggaaatgtgggggtatacccttagccatagtcagcattgcaggtcttctgactagcatgcccatgcacagttatgatcgttgggagaagatctacaactctcttggcttggagctggaaaccagtccctggcttgaaaaactgaagaatattcttgagcttagttataatgaccttccgtaccatctaaaaacctgtttcttatacttgagcacttaccctgaggatcataagattagaaggaaaagtttattgagacgatggatagcagaacgttttgtggctgcgaagcgtggattgagtgccttagaggtggctgataactatttcagtgaattactcaacaggagtgttgttcatccagttgaaatgagctttgacgggaagatcaagactttccgagttcatgatataatgctggagatcattgtttcaaaatcagttgaggacaatttcatcactttggtaggtgaacagcataatttagctccacaagagaagattcggcggctatccattcatggtggaagtaacagaaatattgccacaagcaaaatgttaagccatgtccgatcattgagtatatttgctgacggagaaatgttacaatttgcttggataaaacttcttagaatattagacctagaaggttgtggatttgtcaggaatgaagatatcagaaatgtatgtagactgtttcagttggaatatgtcagtctcagaaatacgtatgtcactcagctccctgtgcaaatagggaacctgaagaagttggcgacactggatgtccgggacacaggcataaagtctctgcctcctcacactaccaagctgccaaatttatcaaacctgcttggagggagaagagtttataaccacattggtttatatcctatttccgagttctggggactgcatatccctaagaagcttggcaatttagaaatacttacgacgcttgcacaagtagagatcacagactctacttcccattgtgtatctgaattgggaaagctttcacagttgaggaagctaggagtaatgatgtttgttgatgatgacatgaattggatgtctttggtcactgccattgcaaaactgagcaaccttcagtcactgctggtttggcgacctgatggagtaatgaatttcaggactcttgatacactatccaggccaccaatgtttctgaaaagcataaacttcagaggtaagttggaacaactaccaaaatggattggttcgcttgtgaacctcaccgagttgacccttcgtgccactgaattgaaatgtgaggagcacatgaaagttctcgctgagttgccaagcctactttatctcaggttgcatcacagtgcatacaccggaacaaaactcacgttctctgcgtcagaatttccaagtctcaaactgctcactattcatttccgtgtataccaggcattaaacctgaggtttgaggaaggcactgcgcctaagctccatagcctagagctatctttctttcaacaagcctccatccggcggccttcaggcatcaattttcttccaagccttcaggaggtcttggtccacgctgatcaagacattgactcagaaggtatggtgcagtatttgatggatgaagctagcaggaatcctaacaaacccactgttactttcaaggcaaaacaatggaagccaactggctcaaggacagatccacccatagattacaggggaaacatctggttt

SEQ ID NO: 68 - protein, 961 aa, Koeleria macrantha
MEHAVVSAGGGAVDILLCKLGTVLIQEAQLLGGIRGELQYMKDELESMTAFLQDLAEKENRRKQVKIWMKQVRELAYDVEDCVDVFTYHLGSSTSGSGLAELFHRCIRLLQTAMVRRQIAKQFQELKVRATSISDRNLRYGGNHLISGAEGNTFAPQPAPSSIISLDIRTPALFPEITKLVGVEVRQSNLVNWLVVEDVPQLMVVSIFGFGGLGKTTLAMTTYQTASASFQCRAFVTVSQKFDVKALIRDILRQTIQPVDRNGPTPTVDPLKGMEEWNVGQLASMLRQHLEDKRYLIVLDDVWTISAWEGIRFSLPNSHTGSRIIVTTRMKTVAQACCLHEYDRAYEIEPLTGGESSELFFKRIFGNRENCPSVLENISEKILGKCGGIPLAIVSIAGLLTSMPMHSYDRWEKIYNSLGLELETSPWLEKLKNILELSYNDLPYHLKTCFLYLSTYPEDHKIRRKSLLRRWIAERFVAAKRGLSALEVADNYFSELLNRSVVHPVEMSFDGKIKTFRVHDIMLEIIVSKSVEDNFITLVGEQHNLAPQEKIRRLSIHGGSNRNIATSKMLSHVRSLSIFADGEMLQFAWIKLLRILDLEGCGFVRNEDIRNVCRLFQLEYVSLRNTYVTQLPVQIGNLKKLATLDVRDTGIKSLPPHTTKLPNLSNLLGGRRVYNHIGLYPISEFWGLHIPKKLGNLEILTTLAQVEITDSTSHCVSELGKLSQLRKLGVMMFVDDDMNWMSLVTAIAKLSNLQSLLVWRPDGVMNFRTLDTLSRPPMFLKSINFRGKLEQLPKWIGSLVNLTELTLRATELKCEEHMKVLAELPSLLYLRLHHSAYTGTKLTFSASEFPSLKLLTIHFRVYQALNLRFEEGTAPKLHSLELSFFQQASIRRPSGINFLPSLQEVLVHADQDIDSEGMVQYLMDEASRNPNKPTVTFKAKQWKPTGSRTDPPIDYRGNIWF

SEQ ID NO: 69 - DNA, 2565 bp, Koeleria macrantha
  CDS (1)..(2565)
atgagcaatgttataaggcagataggcaccgtgtacctcacggacgaagttgtcaagagttggattgggcaggtccgcggggtggcctaccatgttgaagatataatggataaatactcataccatgttcttcaagttcaggaagaaggattcctgaagaaattcttcatcaaaggaacacattatgtcaaagttttcagtgaaatcgcggatgaggtagttgcggtagagaaggagattctgcaagttatagagatgaagggccagtggttacagccctctcagcttgttccaaatcaactcactgagatggaaagacaacggtcccaagataacttcccagaattcgtgaaagatgaagatctagtaggaattgaagacaacaggaaattgctgaccggatggctgtactctgaagagcccgagagcactgtgataacagtatcgggcatgggtggattaggaaaatctaccctggttacaaatgtctatgaacgtgaaaagatcaacttccatgcacatgcatggatcgttgtttcacagatttacactgttgatggtttgttgaggaagctactatggaagaccggatgcaccgaacaatcggcgcgcattgacaaaatggacgcgcatgacttaaaaaaagaaatacagaaaaggcttgaaaatagaaaatgtttgattgtactggatgatgtctgggagcaagaggtatacttccaaatacatgatgctttccagaatctccaaggaagtcgtatcctcattacgacacggaaggaccatgttgcaggaatttcttctcccaaccgtcaccttgagctcgagccattgagtagctctgatgcatttgaccttttctgcagaagggcattttacaacaagaaggaccacatgtgctccaaggagcttgagacaattgctacttctatagttgacaggtgtcatggcctcccgctagcaattgttaccataggaagcatgttgtcttcaagacaacgattagacttttggaaacaaacttacaatcagcttcgaagcgagttgtcaaaaaatgatcatgtccgagcaattctgaatctgagctaccatgaccttacagacgatctcagaaactgcttcttgtactgcagtctgttcccagaagactaccccatgccgcgtgacagccttgtgcggctgtgggttgcagaaggctttgtgcagagtaaagaaaggaacacgccagagatggtggcagagggaaatctcatggaattgatccaccgcaatatgcttgaggttgtggagagtgatgagcttggtagggtcaacacctgtaagatgcatgatattgtgcgtgaactggctatttctgttgctaaagaagagaaatttgcttcagcaaatgatttcggcacaatgatacacatggataaggatgttcgccggctgtcatcatgtggatggaaagacgacaccacgctgaaacctaaacttccacatcttcgaactgtagtggcactcggagtaatttcatgctcccctggcatgttgtcttcaattttgtccgagtctagctatcttactgttcttgagcttcaagactctgaagtcactgaagtgccagcattgatagggaatctgttcaatctacgttacatcggcttacgacgcaccaaggtcaaatcgctccctgattctattgagaatctgtctaacctccacactctggacattaagcagaccaaaatagagaagctaccacgaggtattgtgaagatcaggaagttacggcaccttttagcagatagatatgatgatgagaagcagacagagttccgctactttatcggaatgcaagcacctaaagagctgtccaacttggaagaactgcaaactctcgagactgtggagtccagcaatgacttggccgagcagctgaagaaactgatgcaactaagaagtgtgtggattgataacataagtgctgccgactgtgcaaatctgtttaccaccctgtcaactatgccacttctttcgagcctgcttctttctgcaagggatcagaatgaggaacttagctttgaggctctccagccaaggtctacagatctacaaaggttgattataagaggacaatgggccatggggacactaaattgcccgatctttctctcccatggaaaaaacctgaagtatctagcactaagctggtgtcacctaggggaagatccactggggatgctcgcacctcacctgccgaacctcacatatctgaaacttaacaacatgtatggtgcaaatactttggttctttccgcagattcctttccaaacctgacgacgcttgtcttaaagcacatgcatgatgtcagtgagctaaaaatcagggaaggtgctcttccgtgcattcaaggtttgtatgttgtgtcgctgccaaagcttgataaggtccctcaaggcattgaatcacttcactctctgaagaagctctggttgctgggcttgcacaaggatttcagaagtcagtggctcaatagcggaatgcaccaaaacatgcagcatgttacagaggttcgtgtc

SEQ ID NO: 70 - protein, 855 aa, Koeleria macrantha
MSNVIRQIGTVYLTDEVVKSWIGQVRGVAYHVEDIMDKYSYHVLQVQEEGFLKKFFIKGTHYVKVFSEIADEVVAVEKEILQVIEMKGQWLQPSQLVPNQLTEMERQRSQDNFPEFVKDEDLVGIEDNRKLLTGWLYSEEPESTVITVSGMGGLGKSTLVTNVYEREKINFHAHAWIVVSQIYTVDGLLRKLLWKTGCTEQSARIDKMDAHDLKKEIQKRLENRKCLIVLDDVWEQEVYFQIHDAFQNLQGSRILITTRKDHVAGISSPNRHLELEPLSSSDAFDLFCRRAFYNKKDHMCSKELETIATSIVDRCHGLPLAIVTIGSMLSSRQRLDFWKQTYNQLRSELSKNDHVRAILNLSYHDLTDDLRNCFLYCSLFPEDYPMPRDSLVRLWVAEGFVQSKERNTPEMVAEGNLMELIHRNMLEVVESDELGRVNTCKMHDIVRELAISVAKEEKFASANDFGTMIHMDKDVRRLSSCGWKDDTTLKPKLPHLRTVVALGVISCSPGMLSSILSESSYLTVLELQDSEVTEVPALIGNLFNLRYIGLRRTKVKSLPDSIENLSNLHTLDIKQTKIEKLPRGIVKIRKLRHLLADRYDDEKQTEFRYFIGMQAPKELSNLEELQTLETVESSNDLAEQLKKLMQLRSVWIDNISAADCANLFTTLSTMPLLSSLLLSARDQNEELSFEALQPRSTDLQRLIIRGQWAMGTLNCPIFLSHGKNLKYLALSWCHLGEDPLGMLAPHLPNLTYLKLNNMYGANTLVLSADSFPNLTTLVLKHMHDVSELKIREGALPCIQGLYVVSLPKLDKVPQGIESLHSLKKLWLLGLHKDFRSQWLNSGMHQNMQHVTEVRV

SEQ ID NO: 71 - DNA, 2571 bp, Koeleria macrantha
  CDS (1)..(2571)
atgaacaatgtcatagatcagataggcacgacataccttactgacaaaactgtgaagggttggattgaggaggtcaggaaggtggcctaccgtgttgaggatgtaatggataaatattcttatcactgtcttcaaatggtggaagaacggtttctaaagaagtacctcattaaaggaacccattatgtcattgttttcagtcaaattgctgatgaggtagtcaagatagagaaggagatcgaccaagtaatcaaactcaaggagcagtggttgcaaccatcccagcttgctcatgatccgtttactgagatggaaagacaacggtcccaagatagcttccctgaacttgtgacagatgaagatcttgttggaattgaagacaacaggagaatgctgactgaatggctgtactcggatgagatggacagtaaggtgataacggtgtcaggtatgggcgggttggggaaaacaaccctcgtcacaaatgtgtatgaacgtgaaaaggtcaagttccaagctcatgcatggatggttgtgtctcagacctacactgttgatgatctgttgaggaagttactcaggaaggttggctacaccgaacaaccaggatcatctaacattgacaggatggatgtgtatgatttgaaggaagaagtaaaaagaatgctcaaagataggaaatgtttgctcgtattggatgatgtctggaaccaggaagtgtactttcaaatacgtgatgcattccagaattttcatggaagtcgcatcatcatcacgacacggcagaatcatgttgctgctcttgctccctcgacacggtgtctcgatctcaagcctttgggggaaactcacgcatttgaactcttctgcagaagggtcttttatagcaaaaagaatcatgagtgtcccaaggatctgttgaaaactgctacttctatagtggataggtgtcagggcctgccactagcaatagtaacaatgggcagcctcttgtcttcaaggtcaccaacacaatacatctgggagcaaatatacaatcaatttcgaactgaactgtcgagaagtaatcatgtccgggcagttctaaatctgagctaccatgacctatctggagacctcagaaactgcttcttgtactgcagcctcttccctgaagactacccaatgtcaagggagagccttgtgaggttatgggttgcagaaggctttgtgtcgagcaaagaaaatagcaccccggaggaggtggctgagagaaacctaatggaattgatccaccgcaatatgcttatagtcaaggagacagatgaacttgggagggtgagcagctgcacgatgcatgatattgtgcgagacctggctctttgcattgcgagagaggagcgattcgtatccgcaaatgattatgccgcaatgacacagatggatagggatgttcgtcgtctgtcatcatgcggatggaaagagaatagtgcaccgaaagttaagcttccacgtcttcgaactctggtggcattgggagcaatttcatccagacctgccatgatatcctcaattttgtctgaatccagctacctgactgtcctcgagctacaagactctgaaatcactgaagtaccagcatcgataggagctctcttcaatttacgttatattggcttacgccgcaccaaggtcaagtcactcccagactctgttgaaaatctatctaacctgcagactctggacatcaagcaaaccaatatagagaaactaccaagagggattgctaagatcaagaagctgcaacacctcttagctgatagatatgctgatgagaagcaatcagagtttctatactttatcggaattcaggctcctaaagacctatccaacatggaagagctgcagacccttgagaccgtccaagcaaacaaggacttggctgagcagctgaagagaatgacgcgattgagaagtgtgtggattgacaacataagctctacggaatgtgcagatattttttctaccctgtcaaatatgccacttctttccagcttgcttctttctgcaagggatgagaatgaggcactttgtttcaagactctcaagcccacgtctaaacatcttcacaggttaatcatcagaggggggataaagggaacactggaatgcccgatgtttcgtggccacggggaaaatctcaagtatttagctctaagcaggtgtcactttggagaagatcctctggggatgcttgcatcacacttgccaaacctcacatatctgagacttaacaacgtgcatagtgcagccattttggttctttctgcagattccttccctcacctgaagacacttgtcttaaagcagatgcctgatgtcaacgagctaaatatcatgggtggtgccctttcaggcattgaagccttgtatgttgtgtctctgtcgaagcttgataaggtccctcaaggcattgaatcccttcggtctctgaagagtctcaggctattgggcttgcacaaggacttcagaactcagtgggacaagaacgggatgcaccagaagatgatgcatgttccagaggttcgtgtg

SEQ ID NO: 72 - protein, 857 aa, Koeleria macrantha
MNNVIDQIGTTYLTDKTVKGWIEEVRKVAYRVEDVMDKYSYHCLQMVEERFLKKYLIKGTHYVIVFSQIADEVVKIEKEIDQVIKLKEQWLQPSQLAHDPFTEMERQRSQDSFPELVTDEDLVGIEDNRRMLTEWLYSDEMDSKVITVSGMGGLGKTTLVTNVYEREKVKFQAHAWMVVSQTYTVDDLLRKLLRKVGYTEQPGSSNIDRMDVYDLKEEVKRMLKDRKCLLVLDDVWNQEVYFQIRDAFQNFHGSRIIITTRQNHVAALAPSTRCLDLKPLGETHAFELFCRRVFYSKKNHECPKDLLKTATSIVDRCQGLPLAIVTMGSLLSSRSPTQYIWEQIYNQFRTELSRSNHVRAVLNLSYHDLSGDLRNCFLYCSLFPEDYPMSRESLVRLWVAEGFVSSKENSTPEEVAERNLMELIHRNMLIVKETDELGRVSSCTMHDIVRDLALCIAREERFVSANDYAAMTQMDRDVRRLSSCGWKENSAPKVKLPRLRTLVALGAISSRPAMISSILSESSYLTVLELQDSEITEVPASIGALFNLRYIGLRRTKVKSLPDSVENLSNLQTLDIKQTNIEKLPRGIAKIKKLQHLLADRYADEKQSEFLYFIGIQAPKDLSNMEELQTLETVQANKDLAEQLKRMTRLRSVWIDNISSTECADIFSTLSNMPLLSSLLLSARDENEALCFKTLKPTSKHLHRLIIRGGIKGTLECPMFRGHGENLKYLALSRCHFGEDPLGMLASHLPNLTYLRLNNVHSAAILVLSADSFPHLKTLVLKQMPDVNELNIMGGALSGIEALYVVSLSKLDKVPQGIESLRSLKSLRLLGLHKDFRTQWDKNGMHQKMMHVPEVRV

SEQ ID NO: 73 - DNA, 2745 bp, Koeleria macrantha
  CDS (1)..(2745)
atggaggcagccctggtcagtgcagctacaggggccttaaaacctatcctgttgaagctgaccactttgttgggcgaaaagtacaagcgtttcaagaaggtgcgtagcgagatcaattcccttgcttgtgaacttggtgccatgcatgcttttctcctgaagatgtcagaggaggaggctccggaagcgcaagataccatctggatgaatgaggtaagggagctgtcttacgacatggaggactccatcgatgagttcatgcgatgtgtcgatgaaataagtattgagccagatggcttcatagagaagattaagtactcgttgggtaagatgaaggcccgccaccgtattggcaatgagatcaacaatttgaagaaggaaatctttgaggtggccgggagaaagtctagatacaagattgatcagacctcctccaagaccagtcatacaactattgatcctagatctcttgctatgtttgagcatgcatcaagacttgtcggcattgatgaaccgaagacagagcttatcaaactgttgatggaaaaggatgaatgtccatcaaaacaacaacaagtgaaggtggtctcgattgttggatcaggaggaatgggcaagacgactcttgcaaaccaagtgtaccaagaactcaaaatgcaatttgaatgccgagctttcatatcagtgtcaagaaacccagatatgatgaccatcctaagaactcttcttaatgaagtaagcaatcaaggttatgctaacactaaagatggaagcatacaacaacttataatcaagatcaccgatttcctagttgacaagaggtacttcattgtcattgatgacatatggaacatgaaaacatcggaagtcatcaagtgcgcatttcccataaaccgttatggtagtagaataatcaccactactcgcttgaatgatgtcgctcattcatggctccattcaccattcagtggtcatatttataatataaggcctcttagcatggcacactcaagatgcttatttcgtagaagactattcaactccgaagatgattgccctccacatcttgaagaagtttctgaacaaatattagaaaaatgtgatggcttacctttggcggtcaatgctatttctggtttattggcaaccaaagtgagtacaaaagatcagtgggataaagtgaaaaattctattggtcgtgcacttgaaaggggtcctagtgtccaagggatgataaagatattatctctcagttactttgatcttcctcctcatcttaaatcttgtctactgtatctgagtatatttcccgaagacaatattattaggaaggataatctgataaagagatggattgctgaaggatttattcatgaggaaggaagatatgccttacatgagttaggagagaggtgttttaatgagctggtcaataggagtttgatccaaccccaagagccaaatgtatatggaaaagtagagagttgtaaaattcatgacacaattctggatttcattatatccaagtccgttgaagagaactttgttacattagctggtgtgcccaatctaactattcaggcacaaactaaagttcgtcggctctctctgcacgttggcaaacaaggacattctatcctatccaggggcctagtattgtcccatgtgcgatcacttaatgtatttggggatccaaggaaattcccttctctagataagttcaaacatttgcgtgttctggatttcggagattgctaccaattagaaaaccatcatcttgcaaatttagggaggctttttcagttacggcatctaaacctcagggataccggaataagtaagctcccagaacaaatcagaaacctactgtgcttagaaatgctagacttgagaggcaccgatgtacatgaattaccaacagatattctcagtctcaggaaattagcgcatctccttattgacaactatgttaaatttcctgatggacttgtcaagatgcaagcattggagatgttggagcaggtcggtaccttcgagcagtcacttaattgtctgcaacaacttggccaactaaagaatctgaggaagctgcaccttgattttcaagattatgatgacacagaagttaagaaggagtgcatgaaagctattgtctcttctctgtgcacactagcaacacacaaccttcgttctcttacaattgttaacgatgacggctttttactgaaaacttggtgcccagccccgcttagtctccaaatacttctgacctggcactcaatcatcccagaggttccaagatggctgggctcccttgtcaaccttcaacagttacgtcttgaagcagttagattcaagcaagaagatcttcacatccttggaagcttacctgctctgttaattcttttcctagaatcagtgagtatttatgggaagttaagggtcagtggtgaagttgggttccgttgcttgaagcagttttcttattacctaccaagtgatgcaataaacctgatgtttgcacctggttccatgcccaagctagaaaaattcgacgttcgtttccattcatcagggactggtgattatcattttggaattgaaaacctcccctgccttattactgtgaaatgtctggtaagaggttgtaacagttcggaaattgagaacgcaaaggctggaatgcagatagcagcaagcagacatccgaaccatcttagtctatctttcacaacgttgattatc

SEQ ID NO: 74 - protein, 915 aa, Koeleria macrantha
MEAALVSAATGALKPILLKLTTLLGEKYKRFKKVRSEINSLACELGAMHAFLLKMSEEEAPEAQDTIWMNEVRELSYDMEDSIDEFMRCVDEISIEPDGFIEKIKYSLGKMKARHRIGNEINNLKKEIFEVAGRKSRYKIDQTSSKTSHTTIDPRSLAMFEHASRLVGIDEPKTELIKLLMEKDECPSKQQQVKVVSIVGSGGMGKTTLANQVYQELKMQFECRAFISVSRNPDMMTILRTLLNEVSNQGYANTKDGSIQQLIIKITDFLVDKRYFIVIDDIWNMKTSEVIKCAFPINRYGSRIITTTRLNDVAHSWLHSPFSGHIYNIRPLSMAHSRCLFRRRLFNSEDDCPPHLEEVSEQILEKCDGLPLAVNAISGLLATKVSTKDQWDKVKNSIGRALERGPSVQGMIKILSLSYFDLPPHLKSCLLYLSIFPEDNIIRKDNLIKRWIAEGFIHEEGRYALHELGERCFNELVNRSLIQPQEPNVYGKVESCKIHDTILDFIISKSVEENFVTLAGVPNLTIQAQTKVRRLSLHVGKQGHSILSRGLVLSHVRSLNVFGDPRKFPSLDKFKHLRVLDFGDCYQLENHHLANLGRLFQLRHLNLRDTGISKLPEQIRNLLCLEMLDLRGTDVHELPTDILSLRKLAHLLIDNYVKFPDGLVKMQALEMLEQVGTFEQSLNCLQQLGQLKNLRKLHLDFQDYDDTEVKKECMKAIVSSLCTLATHNLRSLTIVNDDGFLLKTWCPAPLSLQILLTWHSIIPEVPRWLGSLVNLQQLRLEAVRFKQEDLHILGSLPALLILFLESVSIYGKLRVSGEVGFRCLKQFSYYLPSDAINLMFAPGSMPKLEKFDVRFHSSGTGDYHFGIENLPCLITVKCLVRGCNSSEIENAKAGMQIAASRHPNHLSLSFTTLII

SEQ ID NO: 75 - DNA, 3333 bp, Koeleria macrantha
  CDS (1)..(3333)
atggattggctcctgactaccggcttgtcggccaccgccgacgcgtggggcgcccacgccggcctcggcgacgacgtagacagactgcgctccgtgctgccccgcgtgcacgcgctggttgagcgaggggagcagtggaggttctccaacccaggtatcgccgatctgctcacccggctcaaggacgcggcctacgacgccgaggacctcgtggacgagctcgccacgaacgagaagcagtcaagccagagcctcttcccttccgtgcgcagtttcctgcgtggattggtcaccggcgtcgcggatagagccagaggcgtcaggtctcggctcgagtacgcgtccaccgacatggagcgggccatcgccgcgctggacgcgcctggcaaggcgacggcgcggcgcacgctccgggagacaagctcgttcatcgggaggcccgtggtccttggcagagaccgggagcgcgaggatgtggtccgtctgcttctgaatccagtccgtgcccataattcaggcgatgacggtggcagcagcgcgaagcgacggaagaaccgtgacggcgtggccgtgctggcgattctcggcatgggcggcgtggggaagactactctggcgcagcttgtgtacaatgaccagagggtacaggaccacttcgacttgaggatgtgggtttgcctgccggaatcgctggacgtcacgctggcgacgaaagagatcatagagtcggcgaccaagggggcggcagcgcaacctggtgttggcaatttggactcacttcaggtggttgtcagggatctcgtcaggtccaagaagttccttcttgtccttgataatgcctggtgtgaggacagtgcagagtttcagacgctcgttgcgcctctgaagtatgggcatcctggaagtgccattttggttaccggtcgctcttgcaaggttgcggatgcggccggagcatcggagctggtatgtctggatgggttaccggaggaggcttactgggagctgttcgagcagtatgcattcggtgatgaggaccctgcagaccatcctgaattggtggtcattgggaagaagattgcccataagctcaagggctcccctcttgctgccaagactgtcggtggggcactgagctctgacatgaccgcaaaacattggggcatagtcatggaaaatgggttgtgggagcttgagcaaggtgcaggaggcatcctcccagctctccgacttagttaccagtgcctcccggcacacctcaagcaatgcttcacgttctgtgcagtatttccgaaagggcatatcttcagcagggagactctgattgacatgtgggttgcagaaggcttcatctcgcctcaagaggactttggggacaaatgcttgaaagaattgctcagcaggtccttttttcagcaacacatgttcagtgacttatgttatgtcatgcatgacctgatgtctgatctagcacagtcactctctatagatgagtgtttttgtctgactgatgagaggcgccttctgaaagttccttccactgttcgccatctgtcagtgtgcaccaagcatcttgaactggacaagtttgttgaattgggtaggtacacaaagctgcggtctcttttgatcttcggcatgcgtgggcaagagttgagttattcactcgataatttgtttgataaactcggtaatatccgcttgctggtgcttcgggagtgtgtgatcaaagagctccctagaaatattggcaatttaaaacttctccggtatttcgatatctcttacacaaagatccagtggttgcctgactccatttgccaactaagcaatctgcaagttctgaatgtactgaacgtccctctgaagaaccatccaaagggcttgactagattagccaatctgagaaaatattacatgaacgaaccgattacttcagtgatgagcaatgttagtaacttgacattactggagagctctttagtatttgaaattccaaaaggacaagggcacagaattgcagaactgaaggacatgacacagctgactgaaattttacatgttaggaatcttgagaatgttgtgaaggttgatgctttaaaagccaagatgaacacaaaagcacacctgcaacggttgattatggaatggtcttctagccatatttataatgcagaatttagcaatgctaaatgttcagaagcaagcatgattattgaatcacttgagcctcaccccaaccttgccagtttgaaactgaagtactacggtggcaaccaaacaccatcttggttacaagctggaactcttcgctgcttaactgaactcagtctctcgaactgtcctttcataactgaagttaccagcctcccttcttcccttaggagtttgcacatcatacgatgcagaaatttgaggagtctcgatgagtgtctacagccaaagaacttgcagggaatcaatgaaataactgttatgaactgctcaaagctagcattggtccctgtggagagattttggggctttgcttctcttcgcatattggaaatacaaaattgtccagaacttccacccacaaggaaattgacacttccaccatcaatggaagaattgcttatgaggtcatgcggctatgttgatggatcacttccatcctgcttgcgtaatctgccttcgctcgtaaacttgattatatacaattgtcctaatttactttcccttccagctgaaatagtttcgcacctacgatcactccgagggatgtatgtcggtaactgcagtagcctgcaatccttgggtggattgcaccacctttcatcactcatcaatctgcatattgtgaactgtcctagattgtcagaccttgatccctcgatgtttctcgatgtcagtgaaagccagggattgcaaaagctagagtgcctaaccatcagcagtacctctcttcttagtctgatgatgagaagttcattacctgctcttaaaaccattgtcatgcaccagtccactgactccgtggtggttcatgatccgtgcaacaagttgtgtcagtgttttccgtcattgggagagctgttgtttcaggactgtggaaatcttcttgcactccctgaagaattgcacaccctgtcctgtctccagttcttacgaatattcaactgtccgaagattcagtcgttgccacataagggcttgccaggctctctgagaacattgtcgttcgagaagtgccacccattgctggaagagcagttaaagaagctgaagttttcctacaatacggcaatagtctccgcagctccgctatcacagcgaaaatcagctttgtgtcct

SEQ ID NO: 76 - protein, 1111 aa, Koeleria macrantha
MDWLLTTGLSATADAWGAHAGLGDDVDRLRSVLPRVHALVERGEQWRFSNPGIADLLTRLKDAAYDAEDLVDELATNEKQSSQSLFPSVRSFLRGLVTGVADRARGVRSRLEYASTDMERAIAALDAPGKATARRTLRETSSFIGRPVVLGRDREREDVVRLLLNPVRAHNSGDDGGSSAKRRKNRDGVAVLAILGMGGVGKTTLAQLVYNDQRVQDHFDLRMWVCLPESLDVTLATKEIIESATKGAAAQPGVGNLDSLQVVVRDLVRSKKFLLVLDNAWCEDSAEFQTLVAPLKYGHPGSAILVTGRSCKVADAAGASELVCLDGLPEEAYWELFEQYAFGDEDPADHPELVVIGKKIAHKLKGSPLAAKTVGGALSSDMTAKHWGIVMENGLWELEQGAGGILPALRLSYQCLPAHLKQCFTFCAVFPKGHIFSRETLIDMWVAEGFISPQEDFGDKCLKELLSRSFFQQHMFSDLCYVMHDLMSDLAQSLSIDECFCLTDERRLLKVPSTVRHLSVCTKHLELDKFVELGRYTKLRSLLIFGMRGQELSYSLDNLFDKLGNIRLLVLRECVIKELPRNIGNLKLLRYFDISYTKIQWLPDSICQLSNLQVLNVLNVPLKNHPKGLTRLANLRKYYMNEPITSVMSNVSNLTLLESSLVFEIPKGQGHRIAELKDMTQLTEILHVRNLENVVKVDALKAKMNTKAHLQRLIMEWSSSHIYNAEFSNAKCSEASMIIESLEPHPNLASLKLKYYGGNQTPSWLQAGTLRCLTELSLSNCPFITEVTSLPSSLRSLHIIRCRNLRSLDECLQPKNLQGINEITVMNCSKLALVPVERFWGFASLRILEIQNCPELPPTRKLTLPPSMEELLMRSCGYVDGSLPSCLRNLPSLVNLIIYNCPNLLSLPAEIVSHLRSLRGMYVGNCSSLQSLGGLHHLSSLINLHIVNCPRLSDLDPSMFLDVSESQGLQKLECLTISSTSLLSLMMRSSLPALKTIVMHQSTDSVVVHDPCNKLCQCFPSLGELLFQDCGNLLALPEELHTLSCLQFLRIFNCPKIQSLPHKGLPGSLRTLSFEKCHPLLEEQLKKLKFSYNTAIVSAAPLSQRKSALCP

SEQ ID NO: 77 - DNA, 2898 bp, Koeleria macrantha
  CDS (1)..(2898)
atggaggctgctgtggcgagcgccctgaccaaggaggtggtgctgaagctcgtcacgctgctgagccagaagcacaagctgtccaagggcctcaaggatgacatccgcttcatccgcaccgagctcgacatgatctccagcgccagggacagccacatgggcccggggaggagctcctcgcgcgtatccatggaggagatgcgcgatctggcgcatgacatcgaagactgcatcgatcgattcatgccctgcgtcgcctgcgagggggaagccgcagcagcagcctcggtcctccaccgcgtcaagaaggcggttaccactaccagatccaggttcgcagcggagatccgcaagctacggacgaggctcaaggacgcccacgaccggaggctcaactatgaccttgtccacggatcctcctccgccggaccttctccggcgaccgtggatacgggaacggagactgaccctgtgggcatcgacaagcccaagcaggagcttgtggacctcttgttgcacagccagccgggaaagctgagcgtgatatccatcgtcggattcggcggctccggcaagacgactctcgccagggctgtgtatgattgccccggagtcgtccagagattcccttaccgtgcctgggctgcggcctcggagcacaacgatgctgaggggctcctgaccacgatactccgccagttccacactgtcgatgcgccaccacagccccaaaactccatcaatgattttctgcgcactacagagtgtttaattgtaatcgatgacatcaataagcaatactgggatgtcataaaatctatcttccctagggaaacaaaaggcagaattattgtgaccacggctctccagtcagtagctaatgcttgcagctccggtgatggctatgtttacaagatgagcattcttaatgcagaacactctaaggttttgctaatgaagaaggttttcagtcgagggtgttcacctgaattggagcggggttcaacagccattgtggagaagtgtgatggccttccactcgctcttgtttgtgtggctaatttcttgctaggcgagaatgagctcacaggaagtcactgtgtgcaagtttgccgcagcctcgggtatcatatggagaatgaggcagacttcacaaaactgcaacaggttcttgtgaaaaactacagcagcctgtctggctaccctctcaggacctccttgctatacacaagtgtgtttccaaatggtcgtcccatcaggaggaatactttaatcaggcgatggttagccgaagggtatgtacagtgtcagtataaacgcagtgatctggaggtagcagatgaaaacttccgggaacttattgaccggaacattattcggccgattgatgctagcaacaatgcaaaggtgaagacgtgcaggccccatgggataatgcacgagttcatgctacacaaatcaatgtgtgataacttcatcacatctcttggtgatcagaaccgaagtaatttccgtcacctgttcatccaaaaccatggaagtagcagtaccttgggtctgaaccagcgtacaagtccagcaacagatgctgctaacggcaatgagaaattccgcgcccggtctctgacgatctttggggatgcaggagaagctgcttcagatttttgcaggtgcgacctgctgcgagtattggatcttgaagaatgcaatgatttggacgatgatcatctaaaggacatacataagctatggcatttaaaatatcttagccttgggggcactatcagcaaccttccaaagaaaattgacaagttacattgtttagagacactggacctgagaaagactaagatagacatattgccacttgaagtcattgggttacctcacctagctcacctgtttggaaagtttaagtttgggaaaaaggacttgagaaagagtgaactagaggagttctcacaaagaaaaagtaagttgaagactcttgcaggatttgttgcagaccaaaaccctggatttctacaactgatggctcatatgaaagaactgaaaaaggttaagatatggtgtgaatccactggagcagacaacaagagcttgcctcacatttcgagggcagttcagaagtttgctcaggatggtatggacacaacaggtgttcgttctctgtcacttgattttggaaattccttgggagacttcctgagttctgtacaagaatattgctatcttagctcgctgaaactgcacggccggctcagtctattgcctcagtttgttacatccctgtgtggcctcacagagttgtccctttcacccactaatttgatgggccatgatctatccaacctgcgtaagctgcgctacctgctgtatctcaagctggttgaagctgaccttgagagcttcaccatagaaactgggtatttcccaagcctgcgacgcttatgccttgtcgtgacaatgcccaagctccctacaatcaaagagggagctctgccatatcttgtctcgcttcagctgctctgtaaagatctagtaaatctttcaggcatgaagattgagttccttgactgcctcgaggaagttgctcttgattccatggtcagtacaaaaacagcagaaatgtgggaaacagcagcaaagaagcatcccaagagaccaaaggttctgtttctcaaaaggattgatcccagcgaaactgagtcttctgtgaaatacgttgcagcagatggaccaataagtgacaaatgcacaatccattcagttcaatcaaattcaacgaccaaacacaattcatctttgaagacaataattgtttcagattccttccaggctgcatccgatctgtccattgttgggaacggtgccacacctccttctgcaagcatatgc

SEQ ID NO: 78 - protein, 966 aa, Koeleria macrantha
MEAAVASALTKEVVLKLVTLLSQKHKLSKGLKDDIRFIRTELDMISSARDSHMGPGRSSSRVSMEEMRDLAHDIEDCIDRFMPCVACEGEAAAAASVLHRVKKAVTTTRSRFAAEIRKLRTRLKDAHDRRLNYDLVHGSSSAGPSPATVDTGTETDPVGIDKPKQELVDLLLHSQPGKLSVISIVGFGGSGKTTLARAVYDCPGVVQRFPYRAWAAASEHNDAEGLLTTILRQFHTVDAPPQPQNSINDFLRTTECLIVIDDINKQYWDVIKSIFPRETKGRIIVTTALQSVANACSSGDGYVYKMSILNAEHSKVLLMKKVFSRGCSPELERGSTAIVEKCDGLPLALVCVANFLLGENELTGSHCVQVCRSLGYHMENEADFTKLQQVLVKNYSSLSGYPLRTSLLYTSVFPNGRPIRRNTLIRRWLAEGYVQCQYKRSDLEVADENFRELIDRNIIRPIDASNNAKVKTCRPHGIMHEFMLHKSMCDNFITSLGDQNRSNFRHLFIQNHGSSSTLGLNQRTSPATDAANGNEKFRARSLTIFGDAGEAASDFCRCDLLRVLDLEECNDLDDDHLKDIHKLWHLKYLSLGGTISNLPKKIDKLHCLETLDLRKTKIDILPLEVIGLPHLAHLFGKFKFGKKDLRKSELEEFSQRKSKLKTLAGFVADQNPGFLQLMAHMKELKKVKIWCESTGADNKSLPHISRAVQKFAQDGMDTTGVRSLSLDFGNSLGDFLSSVQEYCYLSSLKLHGRLSLLPQFVTSLCGLTELSLSPTNLMGHDLSNLRKLRYLLYLKLVEADLESFTIETGYFPSLRRLCLVVTMPKLPTIKEGALPYLVSLQLLCKDLVNLSGMKIEFLDCLEEVALDSMVSTKTAEMWETAAKKHPKRPKVLFLKRIDPSETESSVKYVAADGPISDKCTIHSVQSNSTTKHNSSLKTIIVSDSFQAASDLSIVGNGATPPSASIC

SEQ ID NO: 79 - DNA, 2883 bp, Koeleria macrantha
  CDS (1)..(2883)
atggagcatgctgttgttagcgctggtgggggtgctgtcgacatactgttgtgtaagctgggaacggtgctcatccaagaagcacagctccttggaggcatccgaggtgaactgcaatacatgaaagatgagctggagagcatgacagcgtttctccaagaccttgctgagaaggaaaatcgcaggaagctggttaagatttggatgaaacaggtgcgagagctcgcgtatgatgttgaagattgcgtcgatgtgtttacgtatcaccttggaagcagcacgagtggttctggtcttgccgagctcttccacagatgcatccgtctcctgcaaactgccatggtgcggcgtcagattgcaaaacaattccaagaactgaaagtgcgtgcgacaagtattagcgaccgaaacttaaggtatggtggtaaccatctcatttccggagcagaagggaacacatttgctccacaaccagcaccgtctagtattagttctctggatattcgtactcccgcactcttcccagagataacaaaacttgtgggcgttgaagttcgtcagagtaatcttgttaattggttggtggttgaagacgtgccacaattaatggtggtatcgatatttgggtttggtggtttgggcaagacaactcttgctatgacgacatatcaaacagcaagtgcaagcttccaatgtcgagctttcgtaactgtatcccagaaatttgatgtcaaggctctcataagggacattcttcgacagactattcagccagtagatcgaaatggtccaacacccacagtggacccactcaaaggcatggaagaatggaacgtgggacaacttgcaagtatgctaaggcagcatctagaagataaaaggtatcttattgttcttgatgatgtttggaccatctcagcttgggaaggtattcgattttctctgcctaactcacatactggaagcagaataattgttaccacaagaatgaaaactgtagcacaagcctgctgcctccacgagtatgacagagcttacggaattgaaccactcacaggtggtgaatctagcgagttatttttcaagagaatattcggtaacagggaaaattgcccatctgtcttgaaaaacatttcagaaaagatcctggggaaatgtgggggtatacccttagccatagtcagcattgcaggtcttctggctagcacgcccatgcacagttatgatcgttgggagaagatctacaactctcttggcttggagctggaaaccagtccctggcttgaaaaactgaagaatattcttgagcttagttataatgatcttccgtaccatctaaaaacctgtttcttatacttgagcacttaccctgaggatcataagattagaaggaaaagtttattgagacgatggatagcagaacgttttgtggctgcgaagcgtggattgagtgccttagaggtggctgataactatttcagtgaattactcaacaggagtgttgttcatccagttgaaatgagctttgacgggaagatcaagactttccgagttcatgatataatgctggagatcattgtttcaaaatcagttgaggacaatttcatcactttggtaggtgaacagcataatttagctccacaagagaagattcggcggctatccattcatggtggaagtaacagaaatattgccacaagcaaaatgttaagccatgtccgatcattgagtatatttgctgacggagaaatgttacaatttgcttggataaaacttcttagaatattagacctagaaggttgtggatttgtcaggaatgaagatatcagaaatgtatgtagactgtttcagttggaatatgtcagtctcagaaatacgtatgtcactcagctccctgtgcaaatagggaacctgaagaagttggcgacactggatgtccgggacacaggcataaagtatctgcctcctcacactaccaagctgccaaatttatcaaacctgcttggagggagaagagtttataaccacagtggtttatatcctatttccgagttctggggactgcatatccctaagaagcttggcaatttagaaatacttacgacgcttgcacaagtagagatcacagactctacttcccattgtgtatctgaattgggaaagctttcacagttgaggaagctaggagtaatgatgtttgttgatgatgacatgaattggatgtctttggtcactgccattgcaaaactgagcaaccttcagtcactgctggtttggcgacctgatggagtaatgaatttcaggactcttgatacactatccaggccaccaatgtttctgaaaagcataaacttcagaggtaagttggaacaactaccaaaatggattggttcgcttgcgaacctcagcgagttgacccttcgtgccactgaattgaaatgtgaggagcacatgaaagttctcgctgagttgccaagcctactttatctcaggttgcatcacagtgcatacaccggaacaaaactcacgttctctgcgtcagaatttccaagtctcaaactgctcactattcatttccgtgtataccaggcattaaacctgaggtttgaggaaggcactgcgcctaagctccatagcctagagctatctttctttcaacaagcctccatccggcggccttcaggcatcaattttcttccaagccttcaggaggtcttggtccacgctgatcaagacattgactcagaaggtatggtgcagtatttgatggatgaagctagcaggaatcctaacaaacccactgttactttcaaggcaaaacaatggaagccaactggctcaaggacagatccacccatagattacaggggaaacatctggttt

SEQ ID NO: 80 - protein, 961 aa, Koeleria macrantha
MEHAVVSAGGGAVDILLCKLGTVLIQEAQLLGGIRGELQYMKDELESMTAFLQDLAEKENRRKLVKIWMKQVRELAYDVEDCVDVFTYHLGSSTSGSGLAELFHRCIRLLQTAMVRRQIAKQFQELKVRATSISDRNLRYGGNHLISGAEGNTFAPQPAPSSISSLDIRTPALFPEITKLVGVEVRQSNLVNWLVVEDVPQLMVVSIFGFGGLGKTTLAMTTYQTASASFQCRAFVTVSQKFDVKALIRDILRQTIQPVDRNGPTPTVDPLKGMEEWNVGQLASMLRQHLEDKRYLIVLDDVWTISAWEGIRFSLPNSHTGSRIIVTTRMKTVAQACCLHEYDRAYGIEPLTGGESSELFFKRIFGNRENCPSVLKNISEKILGKCGGIPLAIVSIAGLLASTPMHSYDRWEKIYNSLGLELETSPWLEKLKNILELSYNDLPYHLKTCFLYLSTYPEDHKIRRKSLLRRWIAERFVAAKRGLSALEVADNYFSELLNRSVVHPVEMSFDGKIKTFRVHDIMLEIIVSKSVEDNFITLVGEQHNLAPQEKIRRLSIHGGSNRNIATSKMLSHVRSLSIFADGEMLQFAWIKLLRILDLEGCGFVRNEDIRNVCRLFQLEYVSLRNTYVTQLPVQIGNLKKLATLDVRDTGIKYLPPHTTKLPNLSNLLGGRRVYNHSGLYPISEFWGLHIPKKLGNLEILTTLAQVEITDSTSHCVSELGKLSQLRKLGVMMFVDDDMNWMSLVTAIAKLSNLQSLLVWRPDGVMNFRTLDTLSRPPMFLKSINFRGKLEQLPKWIGSLANLSELTLRATELKCEEHMKVLAELPSLLYLRLHHSAYTGTKLTFSASEFPSLKLLTIHFRVYQALNLRFEEGTAPKLHSLELSFFQQASIRRPSGINFLPSLQEVLVHADQDIDSEGMVQYLMDEASRNPNKPTVTFKAKQWKPTGSRTDPPIDYRGNIWF

SEQ ID NO: 81 - DNA, 3897 bp, Koeleria macrantha
  CDS (1)..(3897)
atggatatgaacttccatgtgatcaaaaatattacagacaatttttcagagcttcgaaaggttggacgtggtacgtacggaagtgtttacaaggcggagtataatggggaagagattgctgtgaagctgctctgttccttgaccgatgataagcagtttcatagcgaaatccgcaaccttaccaaggtctctcaccaaaatgttgtgcggtttattggatactgctccgaaactcggaaggaataccttaagcacaatggcacgcgtattttggttgaatcgacggagcgagtcctctgcttcgaatacatgcagggcggaagccttgaaaaatatattgcagatgaatcttgtaaacttgactggcccacatgttacaacattattagagggatttgtcagggcttaaattaccttcataatgctctcggagatcctatttggcacttaggcttgaagcctgctaatatattgttggataagagcatgacgcccaaaatagcagatcttggtctatcaaaaatttgtgcttcatcacaatcacgtcatacagagaatatcacaggaacaatcggctacatgccaccggaatacataaatcatggcattataacaaagaagcatgatgtattcagtcttggcatcataattataaagatgttggccggaaatattggatatgcccgctattctgagatgtctcccaaagagtttgttaagcttgtaactgaaaactggacgaagaggttgcaggcaatgccgggcccatcttcatcacacgaaatagacatcctgcgagtgaatacatgtactgagattgcattaagctgtgtgcaggaggaccgaaaaagaaggcctctcattgaggatattgtccatgaactggaaaaactagaagataagattaaggatatgtcaccatattctgatatatcaatagatctaattggtcagaaaagttctacctccaacattctcgcggtcgatccggcggtagagctggatacgatgaaacggacgattgcttatgttgtagcggacaaatttccagtgtattctgaccactcagaagacatacttggtcaggaggcaattaactcaatgaagagtgggcaagtgcctatgttgagctacttgacagggtcaatgaactcactcgtcgacaagctcactcaacagaagaatggtcccatatttggaacgttacatgaagatctaatggctcttaagaaagatttcgacaagcttgccgggaacggcgaggtggtggtgaacttgcaagtaaaagtgtggataaagcaagtcagggaggttgtcttcgacatcgaagactggatcgatggaaagccagagaccatgggagatccaacagagagagaagagaaagtccaggaatttggaacactcatcaaggaggcgtgtagccgctgcagaagatacaatctcctcatcaatgtggggactgacgcagctgctcttgcacttgcacccaacaaagtcaacgacgttgattctccattgcttttggggaacaaagctggcgatatcgtaggtctcggtggtccaaaacagattctcaaggagcatcttcttcaccagcacaagaagctgaaggttgtgtccatcctcggaataggtggccttggtaagaccactattgccatggaactacatggggagcttcaagcagagttcccatgtagagcttttgtctatgttggacgaaacccatcagtaaggacgatcttagtcaatatcctacatcagactatgtcttcaagcgaacgtgaggggtatttcaaggctcggcttaagcccaacgacgatgatttcttgcctctgcacgagcgggagcacgaggtcattttggagaaacacttggatgagcaacagatcattgctttactctggaggcacctcagtaaaaagaggtatttgattgtactcgatggtatatggagtatacgttattggagggctatcagcggtgctttgcctgataataatcttggaagtcggatactgacaacaactcgcattatggatatagctgaatcatgttcaccaggtcgcactgacatggtacatcacatggaggctctaagggaggctgaatccaagagattattttttggggaaggagggagaccggatgaccacgagatattgaaaatgtgtggtggcataccattggccataattctcgcggccgcagcctgcaaatatgaagaacttgtggggccaaagatgcctgggaagtctatcttttattcactgaaccaatattccacgtcagaagggacgacaaagattctgcatatgatttatgctgatctatctgtgcctgtgcggtcttgcttcctgtatctgagtgttttcccagaaggttatactatcaagaaaaatcgtctgatacagctatggggagctgaaggatttatacctgaagaacagttgtggagaacaggggagagctactggaacgagctgatcagcaggagactaattcaaccggtattcaggcacgataattacgaggcagtgggttgcaccgttcatggcgtgattcttgacttcatcagatccttgtctagagaagagaactttgctacgatggcttcagaattgagttctggttcatttttggttgacaccattcgtcggttctccgtggactgcaatgatgaagacgaagctcgtgtcgtggcatcaaacagagtgcacctatcaagcatgagatcactcacactttttcttccctcctacagtccaacagagaatcttcagaccccttcggttcctgtgaatcttgttccggcttccaagctaatgagagtaatggatcttcttcctgatttcaaactaatgagagtactggatctggaagatactcgaaatttggagaaccagcatctaagtggcattggaggattggttctgcttaggtacttgggaataggaggcaatggtatcgaccagctaccagaagagatcggaaaactgatgcagttggagacactatatttgaggctgagacggctgcctgcatctattgtgaatttggaaaatctgaggcatctacatcttgacatgtatttcatgggtagagagatgtctgaagaattgcaagaattagacaaagtaacaaacctgctgaggtactggaatcgtctgaggatgcttgctttaaccatggatgcaaggtatctgacaagaactattccacggagtgtcgcatctttctttgaggaggtttttaggtctaaccttgaatccctgtatcttcattttcctttcggtcctgacgagttgcttccgttactggtggattcatggaagaaggtcactactcctccaccatcatcaacaaatgcacgcccaagttttttgccccggagatttgaactgataatctcagatataaacctcaatggagtcccaccaaaaatggcatccgtttcgcacctcacccacctgcgcatcaaactgttttctgtagatgacgaagttctcagaattctcggggggttgccaaagctactcagtctgaacttgtcttcagctcgtccaccaaagctaggagggtacatcatcacggaggatgtttttcggtgcctgcaggcaggctttttcaaaggccagatggggctgattttcatgaaaagagccatgccgcagctccagatgcttagcttcgataaaagtaaaggacatatttatgctggtatcgagcacctcacctgcctcaagcgagtccatgccgtccacaactgctatgcagctacagattctgagatactgacttgggaggctcgcatcagagaacgagtaggtcggaatcccaataaacccgcactaaaatttatcagaacatacgagaagacgatgagctacgag

SEQ ID NO: 82 - protein, 1299 aa, Koeleria macrantha
MDMNFHVIKNITDNFSELRKVGRGTYGSVYKAEYNGEEIAVKLLCSLTDDKQFHSEIRNLTKVSHQNVVRFIGYCSETRKEYLKHNGTRILVESTERVLCFEYMQGGSLEKYIADESCKLDWPTCYNIIRGICQGLNYLHNALGDPIWHLGLKPANILLDKSMTPKIADLGLSKICASSQSRHTENITGTIGYMPPEYINHGIITKKHDVFSLGIIIIKMLAGNIGYARYSEMSPKEFVKLVTENWTKRLQAMPGPSSSHEIDILRVNTCTEIALSCVQEDRKRRPLIEDIVHELEKLEDKIKDMSPYSDISIDLIGQKSSTSNILAVDPAVELDTMKRTIAYVVADKFPVYSDHSEDILGQEAINSMKSGQVPMLSYLTGSMNSLVDKLTQQKNGPIFGTLHEDLMALKKDFDKLAGNGEVVVNLQVKVWIKQVREVVFDIEDWIDGKPETMGDPTEREEKVQEFGTLIKEACSRCRRYNLLINVGTDAAALALAPNKVNDVDSPLLLGNKAGDIVGLGGPKQILKEHLLHQHKKLKVVSILGIGGLGKTTIAMELHGELQAEFPCRAFVYVGRNPSVRTILVNILHQTMSSSEREGYFKARLKPNDDDFLPLHEREHEVILEKHLDEQQIIALLWRHLSKKRYLIVLDGIWSIRYWRAISGALPDNNLGSRILTTTRIMDIAESCSPGRTDMVHHMEALREAESKRLFFGEGGRPDDHEILKMCGGIPLAIILAAAACKYEELVGPKMPGKSIFYSLNQYSTSEGTTKILHMIYADLSVPVRSCFLYLSVFPEGYTIKKNRLIQLWGAEGFIPEEQLWRTGESYWNELISRRLIQPVFRHDNYEAVGCTVHGVILDFIRSLSREENFATMASELSSGSFLVDTIRRFSVDCNDEDEARVVASNRVHLSSMRSLTLFLPSYSPTENLQTPSVPVNLVPASKLMRVMDLLPDFKLMRVLDLEDTRNLENQHLSGIGGLVLLRYLGIGGNGIDQLPEEIGKLMQLETLYLRLRRLPASIVNLENLRHLHLDMYFMGREMSEELQELDKVTNLLRYWNRLRMLALTMDARYLTRTIPRSVASFFEEVFRSNLESLYLHFPFGPDELLPLLVDSWKKVTTPPPSSTNARPSFLPRRFELIISDINLNGVPPKMASVSHLTHLRIKLFSVDDEVLRILGGLPKLLSLNLSSARPPKLGGYIITEDVFRCLQAGFFKGQMGLIFMKRAMPQLQMLSFDKSKGHIYAGIEHLTCLKRVHAVHNCYAATDSEILTWEARIRERVGRNPNKPALKFIRTYEKTMSYE

SEQ ID NO: 83 - DNA, 2259 bp, Koeleria macrantha
  CDS (1)..(2259)
atgattgaacatcgggctgtggtctccatcattgggcgaagtggcatcgggaagacgacattggctaggaagctgtacaatgaccggagtgtgagggagcacttcacggtgcacgcctggataagccttccggcgcgcatccggtttgacaagtacctggagatgttgtacaagcaggtcagcatgcaggtccctgcagaggtcggtacctcaggtgatgttcagtacaaacttgaacagcttctgaagaaacatgagtacttagtggtgctggatggcttggtggacatgagtgactggaactctttggttcggttgctgccagatgacaaccccaatagccggatccttctcaccgcgcagctcaatgtaaaggagattagacccagtgtcaatattgtcctgcaacctcttgttggcagcaccaccgacatcaaaattgagaagttgctgtgtccacgaggctttggttctggattcaatggtatccctgcccgcttcagaagtgagtatctggagatatcggcaggccttccactagccattgttgtgctctgtggcctactacggaccaaggtgtcttatagtgaatgggatgaagtgtttcagcagctgcagacacccaagggccagccagcagttagatgcgtctgggcactggccttcgaagacctgccgcaccacctcaagtcatgctttctgtactttgcaatggcatcagataacatcctcctggatccagaccgtctggtgcgcctgtgggtcgccgaggggttcatcgcgccgaagaagggcaaaaccttggaggaagtagggctaggctacctcaaggagttgatctcgagaggtctggtccaggcggtgaaagatggcaggggaggcatcaagtttgtaactgtacacagcctgctccatgcctttgcagaatctgaagcccaggagtcgggcttcttcgagatgcaccaccacgccaatatcctgaacccgcattccgcacgccgcctcgccctccacaactacgtcgactcctacatcgacattcctgatcacttcccgaaactgcggtcgctcttctgcgacttcttcgaggaggaccagcagcaaggcggcggcggcgagcgcctacagggctgggctgagtggtttctacgagcttgtggtggcagcatttctgagagcccaacgaccagactgcatgacctcagcttcatccggggctcgcggttcctccgtgtcatcgacctctatggcctggtgcttgcaagggtgcctaacgagatcggaggcatcatccatttgaggtacctcggcatcagaaactgcaagctggcggcactcccctcgtccatctccaagctcgacaacctgcagactctggacgtgtgggggacacgggtgcaggacgtcaccgacgagttctgggagatccaggggctgcgacacgtgctcgccgctgacgggttgcggctgtccaggtgtccaggcgcacgcctgaggcacttgcagacgctcgtcggcatcgtgcccgctggccacgcatggggcgcgaggagctgccctctcgactccatggtttgtctgcggtcacttgctatgagcctcgtctgtgaacatcacgtgcctgcgctatcgcgggcgctccagaagatggaacttctcgtaagcctcagcttgagcggggatctcctcccgttgaaagtgttcacgagtcgctgctcgcgccgcctcgaggtcctggtgctcgacgggacaatcgaagccgatgtgggtgacgagccattcttcttgcccagccttgccatgctcagcatccgcaggtcagctgtgaaccagattttcatcgacaaggtggccacgctgccaaacctgacccaaatggagctcctgaatggctcctacagcgaggcgcatttggtgtttcctgcggaggggttccagagcctcacccagctgaagctgctcaacttgccacaactggaattggcgctagtacccaaggctacactcttgacatggtgcggctgccccgtgctcaaggtggaacgcctccaacaaacggctgctcccgatcctgcacaagacatgctttcaggataccgggagccagaattcgatcctagagaagttgagtcgcttgtaagatgtgggggccaggaggatgtcatggttcggacgcatgtaagatggagctcctggatggctcctacagcagggcgcatttggtgtttcctgcggaggggttccagagcctcacccagc

SEQ ID NO: 84 - protein, 753 aa, Koeleria macrantha
MIEHRAVVSIIGRSGIGKTTLARKLYNDRSVREHFTVHAWISLPARIRFDKYLEMLYKQVSMQVPAEVGTSGDVQYKLEQLLKKHEYLVVLDGLVDMSDWNSLVRLLPDDNPNSRILLTAQLNVKEIRPSVNIVLQPLVGSTTDIKIEKLLCPRGFGSGFNGIPARFRSEYLEISAGLPLAIVVLCGLLRTKVSYSEWDEVFQQLQTPKGQPAVRCVWALAFEDLPHHLKSCFLYFAMASDNILLDPDRLVRLWVAEGFIAPKKGKTLEEVGLGYLKELISRGLVQAVKDGRGGIKFVTVHSLLHAFAESEAQESGFFEMHHHANILNPHSARRLALHNYVDSYIDIPDHFPKLRSLFCDFFEEDQQQGGGGERLQGWAEWFLRACGGSISESPTTRLHDLSFIRGSRFLRVIDLYGLVLARVPNEIGGIIHLRYLGIRNCKLAALPSSISKLDNLQTLDVWGTRVQDVTDEFWEIQGLRHVLAADGLRLSRCPGARLRHLQTLVGIVPAGHAWGARSCPLDSMVCLRSLAMSLVCEHHVPALSRALQKMELLVSLSLSGDLLPLKVFTSRCSRRLEVLVLDGTIEADVGDEPFFLPSLAMLSIRRSAVNQIFIDKVATLPNLTQMELLNGSYSEAHLVFPAEGFQSLTQLKLLNLPQLELALVPKATLLTWCGCPVLKVERLQQTAAPDPAQDMLSGYREPEFDPREVESLVRCGGQEDVMVRTHVRWSSWMAPTAGRIWCFLRRGSRASPS

SEQ ID NO: 85 - DNA, 3375 bp, Cynosurus cristatus
  CDS (1)..(3375)
atgagctccatggaggaagccgcgtcaccgggcgtcttggatcctgcacggttggtggcggaggaggcgccgaagctggtccggtcggcttcccgggccatggaggtactggccaccgagctccaatcatgcggcgacgggggccaccggcctagtagggggtgcgggctgaaggtgcgcgtccccgagctggtgcttctcgaggcctatatgctcgtgatatggggcatctctgccggcgctgagccacagcgtgccggtgacaaggcgctggctctgcaggccagggacaccctctacttcatccagctcctgcaggacatgatcgactacggtagacttcaatccactcctagtaaaaatcaatccacacatctcctttccgctgtcaagtggtgtcttccattgtttgtttcgtcgaaaccacgacgcaggatcatgaggggcatcaaagttgtgaatgaagaaacccttaggattggccacctgctggagaagggcgcaccaaatccgcagcggccgccggtgcctgatgcaggcagggagagggtcgtgtatgggcgcgatcaggagagggatgatatcctgcagatgctcatccagccatgccgccaggctgctcagcccaagatgatggccatctccgttcttggtatgggaggaattggcaagaccacaattgctcacatggtattcaacgatgcaagagtcaagcagcattttgatgtcaaatgttgggtaacggtctccactagtttcagcaaaatggagttcgcagcagagatcttaaggtcagcccaaccagcttgggatggctcgcctgagaagttggtggactctcacatgattctgcccgagctccgtcgatttgctgcttccaagaggtggctgattgttcttgatgatgtatgtaatagcgcagatggaattttgctggacatcctcactgctctgcagcctggagatgttgggagcagaattttggcgacttcccgcatcagcacggtgcctcacatgctgggtgcatcgcaggtctacaccgtcagtccgctaaatagggatgattgctgtgccctgctcaaggaacatgcttttccaagtgatcaccgggatgtctatccagatcttgagccgattggggagcagattgccgctaaactcaatggatcccctcttgctgccaaactggtgggaggtttgctgggagatacaaggagcaaagatcactggatgaaaatcatggaggcaggattacaagataacactgttttccatgccatacacttgagctataagtaccttccggtgcagctcaagcgatgcttcgcatattgcagtttgtttccaaagaactataagtttgatccagcacacttgtcccgcctttggattgccgaaggttttgttcaaccgcaagacaagactgagaaaagggtggaagacatagctagagaatattttgatcagctcctttcacgctcattcttccaggaaatcaagcttggatccaagatttactacttggtgcatgacttgctccatgatctggcaaagtctgttgcagcggaggactgcttctatattgacgatggcatgaactgtgacatcccgtcaacagtgtgccatttgtccatcaccatgaacagtctacccagtctcacaagcttcagtgggctagaaaagctgcgtaccttgttaatccgaccatcacttcagtcctccagttgctcccaagtggattttgctgtaaatttaagaagtatcctggagaagtcaaaacatttgcgtgttcttgatctcagtggttataactccaaagagttgccctgctgcattggtaaattgttacacctccgttacctatctatccatggctccatccagaggcttcctgagtcgattggcaagcttctgcatctgcaaacattgtgcatcactgggaaatgttaccttgagaagcttcccgcgagcattagtaagctcgtcaatttgcggcaccttattgttgaaacaaagtatactgcagaattggtgggcattggtcagctgacaaacattcagggatcacttgaactccacgttgagaagaggaaagggcgtaaattggaagagttgaagaacatcagaggtcttcgtgggttactgaacataaaacgtctagaaaatgtttcaagctatgaagaagcctgcaaagctgagttgaataggaaaccatatcttcattctctgaatctggaatggagctccgctagtagaagtaactcccttcctgctgatgccaaggtacttgaaggcctacagccgcaccaagacataaaggtactaaatattagaaggtatcgtggtaccgaagctcccaattggctgcagtcactgcagcagctgtgttccttgcaccttaccaattgcagaagtttagccatgcttccttcattgggacatctggtgtcactcagatacttacacatgaaggagctgtgtgcagttgaccgaatcggacatgagttctatggcactggtgatgtggcatttccatccctaatattccttgaatttgatgatttcccgaagttacatgactggtctggaagagaagaaagaaattcatttccatgccttgaaagattagttataatggattgtccagaattggtcaaaattcctcccgtcctccaaacaactcgtgatgttaccattgagcgtacactgttcatgccatatatgaggcttgcccctttctcttcaagttcagataagctccagctggatgttcacacaacttctgtccacttcaacgggttacttcataaaaagcacatagaagccattgtatccttgaacataagtggtgctgaacaagttgttggcactgaagaaatagggtcccttttttctctacaaaggttgcagctttgtcggtgcgatttcactgaccatgactttagtaggtttctccaggctgtgccttgtctgtcctcgttggagataattgacctgcctaacataacatctcttccagcatctaaaacacttaggttcagcacaatgctcactgagttatccatacgcagctgtcagatgtttcagtctatgtcatcattgcagtcttttgattcactgaagtttctggtgattgagagatgtcttaaagttaccgcaacatcatttccgtcggactttaagagtctatcatctctcaaagtgctgagaatatcatactgctcagagctccaatctttaccggcatgtggtctgccatcctcattggaaacacttcatattattgggtgccacccagagttgtccaggcaatcagcaaacaggaatggatattactttgacaagcttgcaatagtacctaccgtattgattcgg

SEQ ID NO: 86 - protein, 1125 aa, Cynosurus cristatus
MSSMEEAASPGVLDPARLVAEEAPKLVRSASRAMEVLATELQSCGDGGHRPSRGCGLKVRVPELVLLEAYMLVIWGISAGAEPQRAGDKALALQARDTLYFIQLLQDMIDYGRLQSTPSKNQSTHLLSAVKWCLPLFVSSKPRRRIMRGIKVVNEETLRIGHLLEKGAPNPQRPPVPDAGRERVVYGRDQERDDILQMLIQPCRQAAQPKMMAISVLGMGGIGKTTIAHMVFNDARVKQHFDVKCWVTVSTSFSKMEFAAEILRSAQPAWDGSPEKLVDSHMILPELRRFAASKRWLIVLDDVCNSADGILLDILTALQPGDVGSRILATSRISTVPHMLGASQVYTVSPLNRDDCCALLKEHAFPSDHRDVYPDLEPIGEQIAAKLNGSPLAAKLVGGLLGDTRSKDHWMKIMEAGLQDNTVFHAIHLSYKYLPVQLKRCFAYCSLFPKNYKFDPAHLSRLWIAEGFVQPQDKTEKRVEDIAREYFDQLLSRSFFQEIKLGSKIYYLVHDLLHDLAKSVAAEDCFYIDDGMNCDIPSTVCHLSITMNSLPSLTSFSGLEKLRTLLIRPSLQSSSCSQVDFAVNLRSILEKSKHLRVLDLSGYNSKELPCCIGKLLHLRYLSIHGSIQRLPESIGKLLHLQTLCITGKCYLEKLPASISKLVNLRHLIVETKYTAELVGIGQLTNIQGSLELHVEKRKGRKLEELKNIRGLRGLLNIKRLENVSSYEEACKAELNRKPYLHSLNLEWSSASRSNSLPADAKVLEGLQPHQDIKVLNIRRYRGTEAPNWLQSLQQLCSLHLTNCRSLAMLPSLGHLVSLRYLHMKELCAVDRIGHEFYGTGDVAFPSLIFLEFDDFPKLHDWSGREERNSFPCLERLVIMDCPELVKIPPVLQTTRDVTIERTLFMPYMRLAPFSSSSDKLQLDVHTTSVHFNGLLHKKHIEAIVSLNISGAEQVVGTEEIGSLFSLQRLQLCRCDFTDHDFSRFLQAVPCLSSLEIIDLPNITSLPASKTLRFSTMLTELSIRSCQMFQSMSSLQSFDSLKFLVIERCLKVTATSFPSDFKSLSSLKVLRISYCSELQSLPACGLPSSLETLHIIGCHPELSRQSANRNGYYFDKLAIVPTVLIR

SEQ ID NO: 87 - DNA, 2724 bp, Cynosurus cristatus
  CDS (1)..(2274)
atgacggaagcagtggtccttgccatcaagaagattgggaatgttttagctgatgaaactgcgaggactttggtggccaagctgtcagaaaaggttactaatctgattgatctgggtgacaagattgagcatataaagaagcagttaaaaactatgaacaatgtcatagagcagataggcacaacataccttactgacaaaactgtgaagggttggattgaggaggtcaggaaggtggcctaccgtgttgaggatgtaatggataaatactcataccactgtcttcaaatggtggaagaacggactgtgaagaagtacctcattaaaggaacccattatgtcctacttttcagtcaaattgctaatgaggtagtcaagatagagaaggagatcgagctggtaatcaaactcaaggagcagtggttgcaaccatcccagcttgctcatgacccgtttactgagatggaaagacaacggtcccaggatagcttccctgaacttgtgacagatgaagatcttattggtattgaagacaacaggagaatgctcactgaatggttgtactcggatgagatggactgtaaggtgataacggtgtcaggtatgggcgggttgggaaaaacaaccctggtcacaaatgtgtatgaacgtgaaaaagtcaagttccaagctcatgcatggatggtcgtgtctcagacctacactgtggatgatctgttgaggaagttactcaggaaggttggctacaccgaacaaccaagatcatctaacattgacaggatggatgcgtatgacttgaaggaacaaataaaaaggacgctcaaagataggaaatgtttgctcgttttagatgatgtgtggaaccgggaagtgtactctcaaatacgtgatgcgttccagaattttcatggaagtcgcatcatcatcacgacacggagcaatcatgttgctgctcttgctccctcgacacgttgtctcgacctcaagcctttgggggacactcacgcatttgaactcttctgcagaagggtcttttatagcaaaaaggaccatgagtgtcccaagaatctgctgaaaactgctgcttctatagtgaataggtgtcagggcctaccactagcaatagtaacaatgggcagtctcttgtcttcaaggtcaccgacacaatatatctgggagcaaatatacaatcaatttcgaactgagctgtcaagaagtgatcatgtccgggcagttctaaatctgagctaccatgacctatctggagacctcagaaactgcttcctgtactgcagcctcttccctgaagactatccaatgtcaagggagagccttgtgaggctatgggttgcagaaggctttgtgtcgagcaaagaaagtagcaccccggaggaggtggctgagcgaaacctaatggagttgatccaccgcaatatgcttatagtcaaagagacagatgaacttgggagggtgagcagctgcactatgcatgatattgtgcgagatctggctctttgcattgcaagagaggagctatttgtatctgcaaatgattatgccacaatgacacagatggatagggatgttcgtcgtctttcatcatgcagatggaaagagagtagtgcacccaaagttaaacttccacgtcttcgaactctggtggcattggaagcaatttcatccacacacaccatgctatcctcaattttgtctgaatccagctacctgactgtcctcgagctacaagactctgaaatcactgaagtaccagcattgataggaactctcttcaatttacgttacattggcttacgccgcaccaaggtcaagtcactcccagactctgttgagaatctatctaacctacagactctggacatcaagcaaaccaatatagaaaaactgccaagagggattgctaagatcaagaagctgcaacacctcctagctgatagatatgctgatgagaagcaatcaaagtttctatattttgtcggaattcaggcacctaaaaacctgtccaacatggaagagctgcaaaccctcgagaccgtccaagcaaacaaggacttggctgagcagctgaagagaatgacacgattgagaagtgtgtggatcgacaacataagttctaccgattgtgcaaatatttttgctaccctgtcaaatatgccacttctttccagcttgctcctttctgcaagggatgagaatgaggcactttgttttgagactctcaagccagcgtctaaacatcttcacaggttaatcatcagaggcgggataaagggaacactggagtgcccgatattccgtggccacggggaaaatctcaagtatctagctctaagcaggtgtcattttggggaagatccgctggggatgcttgcatcgtacttgccgaacctcacatatctgagacttaacaacgtgcatagtgcagctattttggttctttcttcagattccttccctcacctgaagacacttgtcttaaagcacatgcctgatgtcaacgagataacgatcatgcgtggtgccctttcaagcattgaagctttgtatgttgtttctctgtcaaagcttgataaggttcctcaaggcattgaatcccttaggaccctgaagagtctcaggctgttgggcttgcacaaggacttcagaattcagtgggacaagaacgggatgcaccagaagattatgcatgttccagaggtttgcgtt

SEQ ID NO: 88 - protein, 758 aa, Cynosurus cristatus
MTEAVVLAIKKIGNVLADETARTLVAKLSEKVTNLIDLGDKIEHIKKQLKTMNNVIEQIGTTYLTDKTVKGWIEEVRKVAYRVEDVMDKYSYHCLQMVEERTVKKYLIKGTHYVLLFSQIANEVVKIEKEIELVIKLKEQWLQPSQLAHDPFTEMERQRSQDSFPELVTDEDLIGIEDNRRMLTEWLYSDEMDCKVITVSGMGGLGKTTLVTNVYEREKVKFQAHAWMVVSQTYTVDDLLRKLLRKVGYTEQPRSSNIDRMDAYDLKEQIKRTLKDRKCLLVLDDVWNREVYSQIRDAFQNFHGSRIIITTRSNHVAALAPSTRCLDLKPLGDTHAFELFCRRVFYSKKDHECPKNLLKTAASIVNRCQGLPLAIVTMGSLLSSRSPTQYIWEQIYNQFRTELSRSDHVRAVLNLSYHDLSGDLRNCFLYCSLFPEDYPMSRESLVRLWVAEGFVSSKESSTPEEVAERNLMELIHRNMLIVKETDELGRVSSCTMHDIVRDLALCIAREELFVSANDYATMTQMDRDVRRLSSCRWKESSAPKVKLPRLRTLVALEAISSTHTMLSSILSESSYLTVLELQDSEITEVPALIGTLFNLRYIGLRRTKVKSLPDSVENLSNLQTLDIKQTNIEKLPRGIAKIKKLQHLLADRYADEKQSKFLYFVGIQAPKNLSNMEELQTLETVQANKDLAEQLKRMTRLRSVWIDNISSTDCANIFATLSNMPLLSSLLLSARDENEALCFETLKPASKHLHRLII

SEQ ID NO: 89 - DNA, 2961 bp, Cynosurus cristatus
  CDS (1)..(2961)
atgctggagagggaaataagaaagaaatctgaggtggccgtgctggacaagatgtccggcatgctgaggcacgctcgagaggatgcggaagacatcttcgacgatgctgaggcgatcgagttgtaccgcaacaggtattggccgcgcctctacggcgccgtgaaggcctgcatcgctcgctggtcgggttcacctctcgacgagctggatgacgcgctggccaaggtgctaaagcatctagaaatggtatcacctggagacgatccagctgagacgcgccgtagatttgagttggacttcaagtctgttcctgggtttaactatggcacgacatctagagaggatccacttcagatgcgccttagacaccagctggccagcagcctgaacgacatgctaaagcgtctagaaatggaaactagaggtgatgctagtctgatgcaccgcagagacgagttggccagcaagcttgttggcctccacggcgctctagcaacctgcaaaagcagcttcatgtggctacgggggtgggcgcggaagatcatcgccttgcaaatgtcagaggacgatatccttcctgtgactaccaaggagcccattccggcgacctcagatcaacaaccagctccggtcactgtgccatcggaatcctgggggtggtgcctctcttgcttgtgcagcttcttccacttcctcaagaaatggtttggtattgccgttgggtttgcctgctttcttcgggactggtcctatcaggtgcttggcgtcacaagcaaccaggagaatgccactgcattagattttctcgttactgctatctcaagacggagcttgaatgacagaatagagaagatagaaagcactattagtgagataaataagtcaccactcttgggcgcagcaagaaagagcgcaccggaggatattgctaacaagaacaggagcaaaattagaacttctagcaaccacaaggtatttggtcgagaggagttgcgtgattctgtcatggaaaagctccgcgagaacccacatggtactagttcatgttactctgcgactggtatatatggtgttgcaggttctgggaagactacttttgcacggtatattcgagatttcgtagaggagcagcaacgtaaggagggcaaacattttcacaccatcatgtgcattcatgtgtccgagactttcagtgtgaaggatatttttcatgaaatgctgaaggatattaccaatgataggcactccgatatttcaggtcatgaggagctgaaagagaagttggagaaatcattgcgtggaaaacgtttctttttgatattggatgatctatgggtgaagacaaggtacgacccgcagctggaggaactaatctcccctctcaaagttgggttgaaaggaagcaaaatccttgtgacggctcgaacaaaagttgcatctggagctctatgtgtcgatgagccaattgaaatgccagatttggatgaggatcagtacttttcaatgtttatgcattatgcattgggtggtaaaaatgttgccgatgaagaatttagaggagttgggaggctgattgcagaaaagctacaccgatcacctattgcagcagtagcagtggcaggacggcttgggacaaaccaagatatcaagttttggaaaaatactgccaaccatggcatgttaaatgacaccatgggtgctctttggtggagctatcagccacttaatctggacatcaggcgttgctttgaattctgcaatattttccctcgaagattcaagttgagaagggacgagctagttcacttgtggatagcgcaagggtttgtaaaaaccagttgtgaaacagaggacatggaagatgtagctgagggatacattgaagagttagtgtcatgctcgtttctgcaaccagaagaatccagtcctgatactgatttctttacaattcatgatttgttccatgatttgttagacaatgttgctagaaatgattgcttcagaatcgacaatgcaaggggccggagagtagaaggctggaaaggagatgtccctcatgatgtccgccatctttttatctggaattatgatgcaaaactgattactgagaggatcactcagttagagaatttacgaactctaattatttacgttggtgggataatcgatgtactagctgaggaaaaattcattgagattaaagtcattgagattatatgcaagaggctgccaaaattgcggatactgtctgtggcttttggttgcgatgaggatcaaatcgtcaaggacagctatgtgttatcagtcccagaatgtattggcatgttaaagcatctacgctatctatctttcaggacatttcacaggaaggtacttttaccaaccgggttaagtgaacttcgccatctccagctgctacgttttgatgatcacattgatttgtattttcaatctgctagccttatcaaattgagacacatattctgcggatcaaaggtgtattgtccaaacataggcaacctgacctcactccaaacgttaccagctttcagagtaaggaataaacaaggctacgaggtaaagcagctgagtgacctaaacaaacttcgtggcaaactggtgatccattgcatcgaaaacgtaaaaactaaggaggaggctcttgaagccaatctagctgccaaggaacggctcatagatgtgtcactaaggtgggattctattggttcaaggtgtagtccagaagttgaagcagagatatttgatggcctgtgccctcccgtgaggcttgaaaaactggaaatcctgggctacgaaggttcgaggtacccagattggatagtgggaaagcagaacggttacccaaaggacctgcaacggcttgagttcaagagatgcgaccaatggggacatgctcctgaacttggtgaggctttccctcatcttcgatcgctctatctt

SEQ ID NO: 90 - protein, 987 aa, Cynosurus cristatus
MLEREIRKKSEVAVLDKMSGMLRHAREDAEDIFDDAEAIELYRNRYWPRLYGAVKACIARWSGSPLDELDDALAKVLKHLEMVSPGDDPAETRRRFELDFKSVPGFNYGTTSREDPLQMRLRHQLASSLNDMLKRLEMETRGDASLMHRRDELASKLVGLHGALATCKSSFMWLRGWARKIIALQMSEDDILPVTTKEPIPATSDQQPAPVTVPSESWGWCLSCLCSFFHFLKKWFGIAVGFACFLRDWSYQVLGVTSNQENATALDFLVTAISRRSLNDRIEKIESTISEINKSPLLGAARKSAPEDIANKNRSKIRTSSNHKVFGREELRDSVMEKLRENPHGTSSCYSATGIYGVAGSGKTTFARYIRDFVEEQQRKEGKHFHTIMCIHVSETFSVKDIFHEMLKDITNDRHSDISGHEELKEKLEKSLRGKRFFLILDDLWVKTRYDPQLEELISPLKVGLKGSKILVTARTKVASGALCVDEPIEMPDLDEDQYFSMFMHYALGGKNVADEEFRGVGRLIAEKLHRSPIAAVAVAGRLGTNQDIKFWKNTANHGMLNDTMGALWWSYQPLNLDIRRCFEFCNIFPRRFKLRRDELVHLWIAQGFVKTSCETEDMEDVAEGYIEELVSCSFLQPEESSPDTDFFTIHDLFHDLLDNVARNDCFRIDNARGRRVEGWKGDVPHDVRHLFIWNYDAKLITERITQLENLRTLIIYVGGIIDVLAEEKFIEIKVIEIICKRLPKLRILSVAFGCDEDQIVKDSYVLSVPECIGMLKHLRYLSFRTFHRKVLLPTGLSELRHLQLLRFDDHIDLYFQSASLIKLRHIFCGSKVYCPNIGNLTSLQTLPAFRVRNKQGYEVKQLSDLNKLRGKLVIHCIENVKTKEEALEANLAAKERLIDVSLRWDSIGSRCSPEVEAEIFDGLCPPVRLEKLEILGYEGSRYPDWIVGKQNGYPKDLQRLEFKRCDQWGHAPELGEAFPHLRSLYL

SEQ ID NO: 91 - DNA, 3336 bp, Holcus lanatus
  CDS (1)..(3336)
atgagagagctcgatacacagatcatgaagagccagcccatggtgagctatacggcagggtcaatgaactcccttgtccacaagctcaccaaactgaagaaccgtccccttgcaatccaagagttactgcaagatctggtgaaacttcagggggatttcttccacaaggtttgtaggcgacgggagacaaacttgcaagtcgaagcctggatgaagcttgtcagggagatggtcttcgacatcgaagactggatcgatcagaagccggacatggggggtcaacaattggagatagaagatgaaataaagaatttcatagcccgggtcaagcatgcaggcgagctttgtcaaaggtacgatcttgtcgttgaagggccaactgtcatccatgatcattttgctgtacccagcgaagccacagttaatcgtcgattacgtttcaaggagaaaactgacctcgtaggattggaagatcagacaaatgagctggtaaggcttctggaaggcgagcagaagatgttaaaggtggtttccgtcgtcggcatggaaggccttggtaagactactcttgcaaaggagatttatacaaagcttcaagggaagttcgactgccacgctttcgtctctgttggccgggggccatcattatgcatgagggccattttaatggacatactctatcaagtaaagtcctcccaccaaatgaaagcaaagcccaagacaaataatcataggggtggaaggagagaagcaaagtatctgcaaaaagttatcactgatctttgggagttcctctccaagaagaggtatttcatcttagtggatggcctatggagtacacgggcttggagtattatcaattgtgctttgcccaacgagaatagaagcagggtattgataacaacttgcatcagcgatgtggccaagtgttgttctgtatgtcccactgacatatatcagatggaggcacttaacgagaagatgtctcgaaggttgtatcaagaaagaacccggaaagatccttgggcacactattgggatgaagctacccaaaacatgttaaaaatatgcggtggcattccattggccataattgttacagctggtttattagcgatgaaatctgaagaaacaatacagctgaatatgtatggggaatgtattctttcatcagcagagcattgttccacgtcaaaagggatgatgaagatactgcagatgagttatgatgctctttctctgcctttgaaatcttgcttcctgtacctgagtgtttttcgagaagattataccatcaagaaagatcgtctgatacgtctttggatagctgaagagcttattcctagagaatataaagagagaagaggggaagggagaagtgacaaagaaacaagaggtgaggaaacaaggcatggagaaacaagagatggagaaataataagaggtgaagaaacaagaaatgaagaaacaatggacggaaatagaagtgatggaggaacaacaagaggggaagggcttattcctagaaaacataaagaaacactagatgaagaaaaaagagggtttatccctagaagatatataaaaacaagaggtgatgaaataatggaagaagaaacagaaagaggtgaaaaaacaaaagatgaggaaatcagaggtgaaggaacaagacatgatgaaagaacagatgagaaaacaagaggcgccaaaacaagagttgaagaaacaacaagagataagaacagaagaggtgaagaaacatcaatgcacgaaacagaaggtgaaaaaacaacaataggtgaagaaaaaaaggatgaagaaagcttgtgggtgacaggagagaggtactttaacgagcttatcatgagaagactgattcagccggtgttcgactacaatgatgaccagccagttggttgcaccgtgcacggtgtaatttttgatttcatcaaatgcttgtcgagcaaaggcaactttgttacagccggtgcagatttgagttccggcagtagcatagatacagttagacgattgacgctcgactcctacaacgatgaagaaagagatggcaccttcgcctcaatcgcggtgcacttatccagagtgcgatccgtgaccatttttgggcatattgaagggatggatgctctaccgtccttcaaacttgtaagagtacttgatctggaagatactgatcatctgaaaagtcggcaccttcaaggtattgggggtttggttctgctcaaatacctgggaattgcagggacttatatcgatacattaccagaagaaattggagaactagagcagttggagaccctagatttgaggcacacaaagcttagcactttgcctgcgtctatagttaaacagaaaaggctggcacatctgctgattgatggtacggtcgatctgcccactgagatccagaatatgcagggattagaggaaatatcaaccattggtgttggaagttggagctcaatccgtccagtggtagagctcgtgagctattcggagtgtctgagggtactaggcataagattggatgtattccactttacttgtttggaaggaatcctcgagatggtcgcaactacaaagcttacttccctattacttgactgccattatagatatttctatggattgtggaaggaattccgtctgtttgatcagctccaaagatttgagctgaaaatttctgttccaatcccaagtacagtggcatattatgtgaaccagattgtcaacgttacccacattgatattgaagttgttgaattagacgacagatttttcactctactggggaaatcgttaaacctggtccttctcaagttagtatctagaggtgtcatcaactcacagtccaagaagggcacaaacaggaggtgcactgtcggcatggatcatggcttctaccgtcttaaggtgttctcgttcacatgccaatctggtgggatgcagctgcagttcactccaggagccatgcaggagctccaaaggctttccctcggattcagtgcacggaaaacactgtctatatacggaaatttcagttttggcattgagcatctgccttctctcacaggagtccaagccaccattgactgcaaatcagctacagtttcggaggtgaaggatgcggaggatgcaatcagaaagaaagaaactaacttcttcagcaaacctacaatagaattcaccagaacacatcaagaatatatgctgcctgatcacaaagcaaaggcgacaacgtcctctaaaagtaggatcagcaagtttttccccatcagcacaaaactgaaaaaactctgcagaaaccccatgata

SEQ ID NO: 92 - protein, 1112 aa, Holcus lanatus
MRELDTQIMKSQPMVSYTAGSMNSLVHKLTKLKNRPLAIQELLQDLVKLQGDFFHKVCRRRETNLQVEAWMKLVREMVFDIEDWIDQKPDMGGQQLEIEDEIKNFIARVKHAGELCQRYDLVVEGPTVIHDHFAVPSEATVNRRLRFKEKTDLVGLEDQTNELVRLLEGEQKMLKVVSVVGMEGLGKTTLAKEIYTKLQGKFDCHAFVSVGRGPSLCMRAILMDILYQVKSSHQMKAKPKTNNHRGGRREAKYLQKVITDLWEFLSKKRYFILVDGLWSTRAWSIINCALPNENRSRVLITTCISDVAKCCSVCPTDIYQMEALNEKMSRRLYQERTRKDPWAHYWDEATQNMLKICGGIPLAIIVTAGLLAMKSEETIQLNMYGECILSSAEHCSTSKGMMKILQMSYDALSLPLKSCFLYLSVFREDYTIKKDRLIRLWIAEELIPREYKERRGEGRSDKETRGEETRHGETRDGEIIRGEETRNEETMDGNRSDGGTTRGEGLIPRKHKETLDEEKRGFIPRRYIKTRGDEIMEEETERGEKTKDEEIRGEGTRHDERTDEKTRGAKTRVEETTRDKNRRGEETSMHETEGEKTTIGEEKKDEESLWVTGERYFNELIMRRLIQPVFDYNDDQPVGCTVHGVIFDFIKCLSSKGNFVTAGADLSSGSSIDTVRRLTLDSYNDEERDGTFASIAVHLSRVRSVTIFGHIEGMDALPSFKLVRVLDLEDTDHLKSRHLQGIGGLVLLKYLGIAGTYIDTLPEEIGELEQLETLDLRHTKLSTLPASIVKQKRLAHLLIDGTVDLPTEIQNMQGLEEISTIGVGSWSSIRPVVELVSYSECLRVLGIRLDVFHFTCLEGILEMVATTKLTSLLLDCHYRYFYGLWKEFRLFDQLQRFELKISVPIPSTVAYYVNQIVNVTHIDIEVVELDDRFFTLLGKSLNLVLLKLVSRGVINSQSKKGTNRRCTVGMDHGFYRLKVFSFTCQSGGMQLQFTPGAMQELQRLSLGFSARKTLSIYGNFSFGIEHLPSLTGVQATIDCKSATVSEVKDAEDAIRKKETNFFSKPTIEFTRTHQEYMLPDHKAKATTSSKSRISKFFPISTKLKKLCRNPMI

SEQ ID NO: 93 - DNA, 2601 bp, Koeleria macrantha
  CDS (1)..(2601)
atgtcccagtccgcggttagcaccgtgcttgggagtgtgggcaatctcgctgttcaggagactaaatttctgtgtggagtcactcttgaagtagccttcttgaaggatgagctgatgcggctgcaggggtacctcagagacgccgatagtaaacaaagatcaggaagtgcaagagttgctgttttggtgaaccagatccgggctgcagcatatgaagctcagaatgcaattgaagctgcagattgcatggagaagaggaaccggctcaagaaaggtttcatgggtgctgtttcaaggtttgctagcctaccgagtgacttggccactcttcgtgaaatcggtgttcagattcaacgtgtaagaaggaagctcagtgagatatttcgaactgcagaccgtctgaaaattgatttggataatactgttgtagtgagtggccaagttgaggatgactttacacaatattatgatcttgggaatcaaaactatgaagatgatgttgtggtcgttggttttcaggacgattacaaagaaataatagataatttagttctcaaagaacaaatgcttagtgctgtctcgatagttgccatgggtggggcggggaaaacaacacttgcaagaaaggtatacacttcgcctacagtgaaacgacacttcgacacaattgcttgggtgactgtatctcagaagttcaagggtgttgatttactaaaagatgttatgaaacaaatcacggggggcaaggatgagtcagttgaccaaatgcaagagtatgaggtgggaaagaagatcagtgaatttctatcacaaaaaaaatatttggtagttctggatgatgtgtgggaagaagacacatgggaccaaataaatagaatggtcaaagtctttccagatgcaactaatggtagcagggtattgttaactacacgtaaagaaaatgttgcaaatcatgtggaaatgccaacccatgtccatgttcttaaggagttagatgaagaggaaagttgggaactttttagtagtaaagctttaccatcatacagaaggtccatcataggtgaagtgggtgagtttgaagaactagggagattgcttgcgagaaagtgtgatggattacctcttgcacttgctattttgggaggttatctgtcaaagaatcttaatatacaagcatggtctgatgtactgttatgttggccatcaacccgaaacacacaaatgttgtgggacatactggctcgtagttacaatgacatgtcagaccattacttaagatattgttttctctatcttgctacttttcccgaggattatagtatagatgtttctgttcttattgcattatggatagcagaaggtttcattccatatgcaccaaaacatgaacctgaagaaacagcacacaagtatgtagttgagctagctcaacgaagcttggtgcaggttactagtaggagcagagcacatggatggattgaggaaataaggattcatgatattttacgtgattggtgcgtagaagaggcaagacaagatggtgttcttgatgtcctcgataaaacttcaggccaaggttgtgcaccatcaactcatattttgatatcatatcgttcttcttatcaagctttacatggtcagaatttgctggcaacacctaatcatcgagctttaattggctttcgacttcagtcaatatccctccctaaactcaaatttcttcgagttcttcactttgaaaactcaaagctaaggggtttctctagtgcaattgatgggtgtgttcacctaagatacctcgggttaataagatgtgaagatgtgactcttcctccttcaattagacaacttctatacttgcaaactattgatatgaggggtacattttcaagagtaccatactatgtttgggatatcccttctctaaggcatgtttatctttgtaatggattttctccgccaaggagtgtgcaacaaaaagagctccaaaccttgtggttaaatattggatctgctagcagtaaaaactacaatctggacatggttaggtttgtgggccagatgactcaactttcaaccttgatattgagaatacatccagacatgcatgcagaaatgatgaatgtaattgcaaacatgcctcgcctccttgatattcacctctataaactgagagtgcttgataaattgcctgaaatccatcatttcccacgaagcctacgtagtttcagcctatttgctcatgacattgaacaagaccctatgccggtattggagaagcttccttgtcttgtgatgctaaagttggagggatatagtggccggaccatgtcatgctctgcccagggttttcctcgtctccaaagcttacaactttttacttacatttgtactgaggagtggacaatcgagattgggaccatgccaaagctctcccacgtgatactcgaggggttccttaaaatgagcaagctccccgagggattgatgcaccttccgtccctcaatcatcttgaactaggagatgtgcacttgatttctactggtgatgacaacacgttgaaggagctgcgactgaaaggatgtgaggtgactaagtat

SEQ ID NO: 94 - protein, 867 aa, Koeleria macrantha
MSQSAVSTVLGSVGNLAVQETKFLCGVTLEVAFLKDELMRLQGYLRDADSKQRSGSARVAVLVNQIRAAAYEAQNAIEAADCMEKRNRLKKGFMGAVSRFASLPSDLATLREIGVQIQRVRRKLSEIFRTADRLKIDLDNTVVVSGQVEDDFTQYYDLGNQNYEDDVVVVGFQDDYKEIIDNLVLKEQMLSAVSIVAMGGAGKTTLARKVYTSPTVKRHFDTIAWVTVSQKFKGVDLLKDVMKQITGGKDESVDQMQEYEVGKKISEFLSQKKYLVVLDDVWEEDTWDQINRMVKVFPDATNGSRVLLTTRKENVANHVEMPTHVHVLKELDEEESWELFSSKALPSYRRSIIGEVGEFEELGRLLARKCDGLPLALAILGGYLSKNLNIQAWSDVLLCWPSTRNTQMLWDILARSYNDMSDHYLRYCFLYLATFPEDYSIDVSVLIALWIAEGFIPYAPKHEPEETAHKYVVELAQRSLVQVTSRSRAHGWIEEIRIHDILRDWCVEEARQDGVLDVLDKTSGQGCAPSTHILISYRSSYQALHGQNLLATPNHRALIGFRLQSISLPKLKFLRVLHFENSKLRGFSSAIDGCVHLRYLGLIRCEDVTLPPSIRQLLYLQTIDMRGTFSRVPYYVWDIPSLRHVYLCNGFSPPRSVQQKELQTLWLNIGSASSKNYNLDMVRFVGQMTQLSTLILRIHPDMHAEMMNVIANMPRLLDIHLYKLRVLDKLPEIHHFPRSLRSFSLFAHDIEQDPMPVLEKLPCLVMLKLEGYSGRTMSCSAQGFPRLQSLQLFTYICTEEWTIEIGTMPKLSHVILEGFLKMSKLPEGLMHLPSLNHLELGDVHLISTGDDNTLKELRLKGCEVTKY

SEQ ID NO: 95 - DNA, 3852 bp, Koeleria macrantha
  CDS (1)..(3852)
atggaggcgatggtcgcttcggtgctcgtgaagcaggccatccggagtgttgtggcggccgcaggcagcccgatgggcagactgtggaggagctgcaaagttgacctggaggagatgaggagcaccctcaatctgctggaggccggcttgagagacgccgagcggcggtccgggaacgaggaggcggtgcgtgtgtggctgcaacagctgaaggccgtcgctcgcgatatttccggcgctctcgatcagcccccaccgccgtcgtggaagattttcgcaagactcagtttggttaacaagatagaacagctaaaggagaaactgaaggtggtggaagagaaacgccatatattcggcttcacgtttcataatagctcaactactgcagatacaaacacaaaaagagaaacaatggcatgccttgatgatgaatttagtgttgttggtcgatcaagggagaaagatgagatagtaaggactctattgcagtctgaaaggaaaacgactattattcctatccttggtcttggaggcatcggtaagaccaccttggcaaaactggttttcaatgatagcagaatgcaagattttgagaggagggcatgggttcatgtttcccaaaacttcaatctggcaagaatagcaaaagctgttatatcacagtttcaaggaactgctgatggctttgaagatctgcagtctctgtataatcagctagagaacatttctagtggcaaaaagtgtttaattgtgctggatgacttgtgggagagtgacattgaactgttgcgcaaaatgaaactaatgatgaattgtgggaaacagaggagcatggttaagataattgtaaccacacgtattgaagcaattgcacaggaattgtctacagctggtccatataaattgggaccattatcggatgataactgctggactgtgttcaaacaaattgcttttcagtggacaaatgaagaagattttcatgtactagaagctgttggaagagacattgctataaagtgcaaaggtctacccctggcagctcatgctgttggatccatgcttcgtaataaaagcgttgacttctggaaagctaccagagatagtactacttgggagcaaagttcatcttacagtgatgtcttgccatcattgagattgagttatgaacatatgccatcttatttgaaaccatgctttacctactgtgccatctttcaaaaaggttgtgccatggataaggacaaactaattcaccagtggattgctcttgacttcgttaaaccagctctaccaaccttgtctcacaaagtgcaagcagaggaatatctgagagagcttttggcgacatctctccttcaatactcggtatcttctctggttactcatgaacaagccaaagatctacaagaactcagcatgcatgatttggtgcatgacttggcacgatcagttgctggcgatgaaacattttgtctacatgctatgaaccaaaatacttcgcccggtgacaattgtcatcatgtagttgtgattacatatgataaaagactttccaggtctttgtctgctgaggttaggtcactacatttcagagattgtgctggacaacaacttcctggtaagacattctcattgacaaaaaacttgcgtgtcttggatataactggatgtgctttgaggaagttgccagatccagttcgtcaattagctcatctgaaatatcttgatgcttcacttctgtgtgataaggatcttcctatgtggattaccggtcttgtggaactacattatttgagcatacatggatctgccaaaatatcagagttgcctaaatcaattgggaatcttaaagatttggaacatctagatttatcatgttgtggaagccttgcgcacttgccggagtttttttccaaccttacaaatctcttgctattgaacatagcagattgttctagcctttctgcattgcccaattccatctgtgaccttgtgaatctagagatcttaaacctctcaggttctacactggaagaactacctaaaggtctgggaaatcttaagaagctaaggctgatgcacctatctaggtgtaccaggcttcgtgatttgcctgattccttctgtcaacttgtgtccttagagaagctagacatatcttattgttctgttttgaaagaactaccacatttctttggcaaccttcaggaactgaggtttttggatttatcgcactgttcaagtcttgttagattgcctgattcatttggcaatctaaacaaactgcagtatttgaacttagaagctttcatgcgtcacatgcccttgcgccagagtgatctacaccgcaactttgacatgctatttcgagtcctatgtaacctatccaacctgcaatacctaaacttctcagcatgccctgtttctgttcttcctgagtctcttggcaatctcaaaatgcttcagacgttgaatatctcacgttgcctttccataagaaaattgccacagagcattcttaaattgccaaaccttaaatctttagttgtgaagaattgctttccacctattgaagatcaaatcaagcaatccgcactggccaatggtttgatgtcactgccaaagttttttgtatgtgccatggctggtggcgattccagcaatattatgcagcttgagggtgtagatgctgaagagcttgagattaaatttcttgaaaatgtggttagtctggaagaagctaagaaagtcaacctggcatgtaaatcaaggctttcaatgttgtttctctcttggactggcaacgccgttgaccatcttgtggatgatgagtctttgcttggggagctcatacccccaaccaccttggagcagttgattctccaaggttacatgggtatcagattcccacgctggatgtgctctacatatcttgcaaacctttccagaatagagctgcataatttgcagggatgcactcagctaccatcacttggtcaattacctaatttgcaggagttatctctgcgtgcattgccaaacatcaagaaactggataagaatttctgtggtggtaatcaagcattcaacaagctgaaattttttgttatgcaggacatgaagaatctggaagtctggtgtacaagagtattaatagatgctgaaggtaaaagggaagaatttatgttccctaaccttcaccagttgctgatacatggatgcaacaagttgatggtgaaaccatgcccgcctgtagctgtggagtgggtcatagaggttaatgatattatagtatcatcatgggatgataaaggacatgcgagcattctgcccaattcgacaacttgtttggaaatatcagattgccatgtcaagcctgatggttggaggttgctctatcatctcccaagtcttcgcaagttaaagctccgcatgtgcagtgagttaaacagcttaccacgaagcattgaagccctggcctcccttcggtcgctacttgtgtttgcatgccatagtttgacagaactgccagaatggtttggcaacctcacctcactccaagaactggaaatcaactattgccctaagctagagtccttacattggtgcatgcagcgccttacctcactcagattgctgcacttgggtcactgtgacaacatttcgtcactgccagagtggttcggcaatctcatctctcttcagagacttgagatctcaggatgccaactaatcaaatctttaccacgatccatgcaacaccacagcaccctgagggagctacaaatcaggcataaccctgaactgaagcagtggtgtgaatttttcttggacgataaagaaatattg

SEQ ID NO: 96 - protein, 1284 aa, Koeleria macrantha
MEAMVASVLVKQAIRSVVAAAGSPMGRLWRSCKVDLEEMRSTLNLLEAGLRDAERRSGNEEAVRVWLQQLKAVARDISGALDQPPPPSWKIFARLSLVNKIEQLKEKLKVVEEKRHIFGFTFHNSSTTADTNTKRETMACLDDEFSVVGRSREKDEIVRTLLQSERKTTIIPILGLGGIGKTTLAKLVFNDSRMQDFERRAWVHVSQNFNLARIAKAVISQFQGTADGFEDLQSLYNQLENISSGKKCLIVLDDLWESDIELLRKMKLMMNCGKQRSMVKIIVTTRIEAIAQELSTAGPYKLGPLSDDNCWTVFKQIAFQWTNEEDFHVLEAVGRDIAIKCKGLPLAAHAVGSMLRNKSVDFWKATRDSTTWEQSSSYSDVLPSLRLSYEHMPSYLKPCFTYCAIFQKGCAMDKDKLIHQWIALDFVKPALPTLSHKVQAEEYLRELLATSLLQYSVSSLVTHEQAKDLQELSMHDLVHDLARSVAGDETFCLHAMNQNTSPGDNCHHVVVITYDKRLSRSLSAEVRSLHFRDCAGQQLPGKTFSLTKNLRVLDITGCALRKLPDPVRQLAHLKYLDASLLCDKDLPMWITGLVELHYLSIHGSAKISELPKSIGNLKDLEHLDLSCCGSLAHLPEFFSNLTNLLLLNIADCSSLSALPNSICDLVNLEILNLSGSTLEELPKGLGNLKKLRLMHLSRCTRLRDLPDSFCQLVSLEKLDISYCSVLKELPHFFGNLQELRFLDLSHCSSLVRLPDSFGNLNKLQYLNLEAFMRHMPLRQSDLHRNFDMLFRVLCNLSNLQYLNFSACPVSVLPESLGNLKMLQTLNISRCLSIRKLPQSILKLPNLKSLVVKNCFPPIEDQIKQSALANGLMSLPKFFVCAMAGGDSSNIMQLEGVDAEELEIKFLENVVSLEEAKKVNLACKSRLSMLFLSWTGNAVDHLVDDESLLGELIPPTTLEQLILQGYMGIRFPRWMCSTYLANLSRIELHNLQGCTQLPSLGQLPNLQELSLRALPNIKKLDKNFCGGNQAFNKLKFFVMQDMKNLEVWCTRVLIDAEGKREEFMFPNLHQLLIHGCNKLMVKPCPPVAVEWVIEVNDIIVSSWDDKGHASILPNSTTCLEISDCHVKPDGWRLLYHLPSLRKLKLRMCSELNSLPRSIEALASLRSLLVFACHSLTELPEWFGNLTSLQELEINYCPKLESLHWCMQRLTSLRLLHLGHCDNISSLPEWFGNLISLQRLEISGCQLIKSLPRSMQHHSTLRELQIRHNPELKQWCEFFLDDKEIL

SEQ ID NO: 97 - DNA, 2796 bp, Hordeum vulgare
  CDS (1)..(2796)
atggtggacgtcgtgacgggggccatggcctccctgctccccaagctggagaagctcctcgagcacaagctgcacaggaccgtcaaggaagacgcggagcagcttctgagggagctgacgagcctgcacgctgccctgggcagcggccccgacccgcgctgggccgacgactgcagggagctgtcctaccacgccgacgacatcgtcgacgcctacctggcggccagtgagcccgccgcctgccgggacggctgcctagggttcctggacaacttgctgggccctcgccgttggttcgccaacgccctcaaagacgtcaagagcctggccctgcatctgtccgacaggtacagtagcaccgataaagataagctcgttccagccaccgcacccaccgggccatcgccgcatctgtggaaagaggcggaggagccgctcgtcggcatggagcgcgggagggatactctaatcaagagccttgcaggcggacaagagatgaagatagtctccattgtgggttctgggggattggggaagacggctcttgctaatctcgtcttccgtcagctcaggccacaattcggttcgtgtgcttttgtttcagtctcctccatgcctgatatggaggggatttttgaccagatgcttcgtcagcttaatgtggagaaaaattacaatcaagaagcaaaggatgcagttagggatttccttcagagcgaaaggtacctgatcatagttgatgatttatggaggaaagaagattggcatattctatcccgcagcttgcccgttaacgcttttggtagcagagtaattgttacaactcgagttaatgacatagcaaagatatgttgttctggccaagatgagttgatatgtgaaattaagcatcttgatcacctgaactccaaatcattatttctacggagatgctttggctctgaggccagctgccctgatgcacttgcaagagaagttggtgagatcttggcaatatgcagtggcattccttcagtaattataaccattgctgagttgctcaatagcaaagtagccacaaggaaaccatgtcaggatgtggtgcacgctttctgttctgcttggaaagagatggcaagctctttacactctgcacgggagcgtattcctggtttggaggacttgataaaggttctatcactcagctacgagaaccttcccagcactctgaagacctgcttgctgtgcatagctacaagtacaaccgtcaagtaccgaaagtttaaaaggggcgaaacagttaggaaatggattgccgaaggatttatctctgaagttgggtggcgcagcagtgaggaagtggcgaacgaatgctttgatgacctcgtcggcagcaaagtgattcagcctgtggaacgcccatccttttatgggaaggggatgtatgaggtcaactgcatgatgctctacgttcttagactgatagcacgagaagagaacttggtcacctttctgtccgacatggacatttcagagacacctgcaacgaggcctgtctttctttctatccgatgctgtggctcaaacggtttaaatggcacagaaaggttggatatgtcgcatgttcgttccataaccatgatccgctgtgacaaggtgtttacgtttaagcatttggggtatctgcgagtgttgaatgtggaggactgtgatggtttggacgatactgatgtacaccacatatgcggaatgatcctgctgaagcacctgagtctgaaagagacaccacaagtcactaggcttcctccacaaatcgggaacctacgacatcttgagactctagagatcgagctgacccaaatcagtgttctcccaccacagatagggaagctgcaaaatcttgagacactggatgtaaggatgacaggagtgaaagagctgcccgaggaactcgtcatgcttcccaaactagcaaatctgcattttggccgaactggggtgaggctacctgccggaagtgaccgcttcaagtcagtcaaggtgctgggcaccattgattcgagggaatgctcggcaagcaccctggaggagattagagagatgactggattgactaagactgaagtcatgctgtatgatgagcccgccgacgtgccaaaaaatgacaatctattgtcttgcatgggcaattgcactagtctgcggtccctaatagttcatggtgatttcattacgagtgacgaccttcctgcatctcccaactttcctctacttgaaaagctaacggtggccacaagattggttaaatttcccgggtggatcgcacatctcagtcgtcttaagaagctagaaatcaggctctttgaacaaggactaaacgatctcaagatacttggagatctgcccagcctcactagccttgcattccagctgtttggcaacccacgaaaacaagtcgcaataacttcaggtttcgccagacttgagtttttcgctttcgactactctgcgccgtgggtaaagtttgatcagggagccatgccaagcctgagacacatcgagctgacacactattcttctggcccagcaggtaaaagcccagcgggtatcatatatcttgagagcctgcagaaggtcaccctcatctactcttcacactgttcaagttgtgctggcgtcatcaagacagttgctgtcatgaggaaggaagctgccagccatgctaatcgaattgtgctttctgttaatggtgacgatgagattttcccatccatctcaagtgttgacggaaagattactacaaccgaaaacgagtgt

SEQ ID NO: 98 - protein, 932 aa, Hordeum vulgare
MVDVVTGAMASLLPKLEKLLEHKLHRTVKEDAEQLLRELTSLHAALGSGPDPRWADDCRELSYHADDIVDAYLAASEPAACRDGCLGFLDNLLGPRRWFANALKDVKSLALHLSDRYSSTDKDKLVPATAPTGPSPHLWKEAEEPLVGMERGRDTLIKSLAGGQEMKIVSIVGSGGLGKTALANLVFRQLRPQFGSCAFVSVSSMPDMEGIFDQMLRQLNVEKNYNQEAKDAVRDFLQSERYLIIVDDLWRKEDWHILSRSLPVNAFGSRVIVTTRVNDIAKICCSGQDELICEIKHLDHLNSKSLFLRRCFGSEASCPDALAREVGEILAICSGIPSVIITIAELLNSKVATRKPCQDVVHAFCSAWKEMASSLHSARERIPGLEDLIKVLSLSYENLPSTLKTCLLCIATSTTVKYRKFKRGETVRKWIAEGFISEVGWRSSEEVANECFDDLVGSKVIQPVERPSFYGKGMYEVNCMMLYVLRLIAREENLVTFLSDMDISETPATRPVFLSIRCCGSNGLNGTERLDMSHVRSITMIRCDKVFTFKHLGYLRVLNVEDCDGLDDTDVHHICGMILLKHLSLKETPQVTRLPPQIGNLRHLETLEIELTQISVLPPQIGKLQNLETLDVRMTGVKELPEELVMLPKLANLHFGRTGVRLPAGSDRFKSVKVLGTIDSRECSASTLEEIREMTGLTKTEVMLYDEPADVPKNDNLLSCMGNCTSLRSLIVHGDFITSDDLPASPNFPLLEKLTVATRLVKFPGWIAHLSRLKKLEIRLFEQGLNDLKILGDLPSLTSLAFQLFGNPRKQVAITSGFARLEFFAFDYSAPWVKFDQGAMPSLRHIELTHYSSGPAGKSPAGIIYLESLQKVTLIYSSHCSSCAGVIKTVAVMRKEAASHANRIVLSVNGDDEIFPSISSVDGKITTTENEC

SEQ ID NO: 99 - DNA, 3210 bp, Aegilops bicornis
  CDS (1)..(3210)
atggaccccgcgacggcggccatggcctccctccttcccaagctcttcgagctcctccacggagaatacaagctgcagaagggcgtgaagaaagatgtagaatttcttgagagggagatgacgagcatagacgccgccctccgcaaagtggccatggtgccgcgtgacaggctcgatgacaactccaagatctgggccaatgatgtcaaggagctggcatacgagatggaggatgtggttgaacgcttcatggtgggcgtccagggcttcgagcccgccgctaaccccaacggcttcaaagggttcgtgaagaaggtggccagcttgttcacaaaaggcaaggcgcgccaccagatcgccgatggaatcaaaggcatcaaggatcaggtccagcaggtggcggatcgacgcgaccggtacaagattgatgatgttgaggcaagtctagctgctgctacaaccatcgttgaccctgtggaccctcgcttgatggttcagttcaaagatcacagagagcttgttggcatcgaggagccaagagacgagctaatcaagaggcttgcagatgaagatggttgtgtgtccaggcagcagctcaagatcctctcgatcttcggatttggaggacttggcaagacgactcttgccagagcagtttacgacaagatgcaagcagaattcgtatgcaaggcttttgtttcggttggtcagaagcctaatctgaagaatgttctcataggtattctcctccgaattgacaaagcctcttgtcacaatgttacactgttagatgaggtgctgctcattgagaaactccgagaactgcttacgaacaagaggtaccttatcatcattgatgatatatgggatttgagttcatgggatataatcaaatgtgcttttattgatagtaagtgtggaagcagagtaatcacaactactcgtatctttgaagtggcaaaagaggcaggtgacatttacaagcaagaacctctttctcctggtagatcgaaggaattgttctgtatgagattatttattggcaaacgcaaaagcccttatcatgagtcggttaagatatctgagaagatattgcagaaatgtggtggcataccgctagctatcattacaatagctagcttgttggctagtaaagcagtaacagattggcctggggtctatgactctattggttttgggaacgaagataacaaagaagtggataccacaagaaagatattgctatatagctactatgatcttccatattatccacggctttgcctattgcacctaggaatataccccgaagattatgagataaaaaaggacactttaatttggaagtgggtggctgaaggatatgtccacgaggaaccaggaagaggattatttgaggttggagagagatacttcaacatgctcatagatagaagcatgatccaggcagtggagaggccatattatagcatcatatatgcttgtcgtgtgcatgatttggtacttgatatgattcattttctttcagaaggtgaaagttttgttactgcatcaaacagtaacaggacatctccgcgtaccattgctcgtaggttagccataaataatgaagtcgtagagcaggatggatctgtggctaacacgagcatgcagcaggtgaggttatatagtgccaccatgtgtcaatttagtatgttgccattgctttcaaactttaaagctctacgtgtgttggctttagaagagtgcactttcatgggaagtgagcactctgtgaagccggaagattctccttatcattttaatcatcttgggaggctgattcacctgaggtaccttgggatctcggaccggctgcttgggttctctgtgcctgggatctctgtgccgcttatcttagaggtccctgaagaaataggggatctaaggtttttgcaggtactggacttgggcagaactggcattaaaaaactgcctcaaagtgttggtcggctaacacaactgaagtgtctgcgctttggcggttccagtatggaggtgttggactgcacgagtttaacatccctggaagaactacagttgcaccttgtctctccagattttctgaaagggcttgccaagctgaaggagttgagaaagtttagcctacactttgaagaggagcacgataatatgttgttcaaagatttgatgggacatgttgccaatctgcagaaacttcaagtcataatgtttaattgtaggcatcgaccacatcctcagacgtggtccggttacgctggctctgtggcccttgggtacctccgtcatctgacaatgaatggcctgcttcctgggctaccagtgtgggttaactcctcatgcctcccgaacctctgccacttgcatatggaactgacggctatgaaatcgcaggatatggagatcctcgggaggttcccggagctcattagtctatgcattcgttgcaatgatggtgttgtttttcctggcaccatggaggagggtgcattccccaagttgagatacttggaactgaagaattctaaccaacctagatttgtacggggagcaatgcccagccttgagtgttttaggataataatcggcctagaagggaccaatggctgggacttccatagcctggtgaacctccctcgtcttgagaaagttgatgctgaaatcctaggctacattgacaggggtatcgacaaagacgagttgcaggcacatgagtcgttgaagcaggcacatgcgtcgttgaagcatgcagttgagatccatcccaaccatcccacactcaagcttcatttgacagaaagaggccttcatgcagatattaatggagatggagttcaagatcatgttcaggttgccggtgcaaatggtgctgagcaaactgttgttagcgggtcgatggaagtgctgaaaccctgttgggcagttgccatgtctggtgtgccggtgcgggagcagctttttaatgtttcaatctgccactacaaccatctcaatctgttccatcatggcgacttttcaagaagttttgggaggacatttgatccatctaacttggaggtggcagcaccaattctactgaagagagatgatggtcttatacacagaagaggatgtcatggcgatatcatctttctaacaagcccgggagaggtgacctcatactctccagacctgcttggtcatgactca

SEQ ID NO: 100 - protein, 1070 aa, Aegilops bicornis
MDPATAAMASLLPKLFELLHGEYKLQKGVKKDVEFLEREMTSIDAALRKVAMVPRDRLDDNSKIWANDVKELAYEMEDVVERFMVGVQGFEPAANPNGFKGFVKKVASLFTKGKARHQIADGIKGIKDQVQQVADRRDRYKIDDVEASLAAATTIVDPVDPRLMVQFKDHRELVGIEEPRDELIKRLADEDGCVSRQQLKILSIFGFGGLGKTTLARAVYDKMQAEFVCKAFVSVGQKPNLKNVLIGILLRIDKASCHNVTLLDEVLLIEKLRELLTNKRYLIIIDDIWDLSSWDIIKCAFIDSKCGSRVITTTRIFEVAKEAGDIYKQEPLSPGRSKELFCMRLFIGKRKSPYHESVKISEKILQKCGGIPLAIITIASLLASKAVTDWPGVYDSIGFGNEDNKEVDTTRKILLYSYYDLPYYPRLCLLHLGIYPEDYEIKKDTLIWKWVAEGYVHEEPGRGLFEVGERYFNMLIDRSMIQAVERPYYSIIYACRVHDLVLDMIHFLSEGESFVTASNSNRTSPRTIARRLAINNEVVEQDGSVANTSMQQVRLYSATMCQFSMLPLLSNFKALRVLALEECTFMGSEHSVKPEDSPYHFNHLGRLIHLRYLGISDRLLGFSVPGISVPLILEVPEEIGDLRFLQVLDLGRTGIKKLPQSVGRLTQLKCLRFGGSSMEVLDCTSLTSLEELQLHLVSPDFLKGLAKLKELRKFSLHFEEEHDNMLFKDLMGHVANLQKLQVIMFNCRHRPHPQTWSGYAGSVALGYLRHLTMNGLLPGLPVWVNSSCLPNLCHLHMELTAMKSQDMEILGRFPELISLCIRCNDGVVFPGTMEEGAFPKLRYLELKNSNQPRFVRGAMPSLECFRIIIGLEGTNGWDFHSLVNLPRLEKVDAEILGYIDRGIDKDELQAHESLKQAHASLKHAVEIHPNHPTLKLHLTERGLHADINGDGVQDHVQVAGANGAEQTVVSGSMEVLKPCWAVAMSGVPVREQLFNVSICHYNHLNLFHHGDFSRSFGRTFDPSNLEVAAPILLKRDDGLIHRRGCHGDIIFLTSPGEVTSYSPDLLGHDS

SEQ ID NO: 101 - DNA, 3393 bp, Aegilops bicornis
  CDS (1)..(3393)
atgaagccctccatctccatggaggaagctggcggcttggatgctgcaagcctggcggaggcgctgcagctggtcctctcggcgtttcgggccatggagggactggccgccgagatccactcctgccacaggacccgtcggaaatgggagctcacgaggtgccggtccaaggtcgccgaccccgagctggaccttctcatcgcccatctgctccagatctggagcatctgtgccggcgcttacccacagcgtgccggcgacaaggcgctggctctgcaggcaagggacgccgtccacttcatcgagctcctgcaggacaaggtccagtacggtaaacttcaacccagctccctggtccagatccttagccatggatccaagctcctttccgctctgaggtggtgtggttgcagccgccttcttgttgcactttttgcgtccaagccaacctacaggttcaccaggggcatcaaggcggtgaatcaagaaactcgcaagattggcaacctgctctgcactttgccaccgcagccgatgcctgattcaggcaggcaagttcttcagacgggggtgggggtgtctgttgggcgcgacaaggacagggatgacgtcgtgcagatgctcctcaagccatgcgccaaggttcctgcacctcacatgatggtttccattgttggcaccgccggaattgggaagaccacgctcgctcagatggtattcaatgatacaagagttgccaagcattttgatgtcagatgttgggtgtcaatttccactagttccaacagaatggacctggtagcggagatcttaaggtcagcccagccagcttgggatacatctgatgagaagatggcggattttcaaatgcttcagtccgagctccgtcgacttgttacctccaagaggtatctcattgttattgatgatatatgtaatggcatggacgatacctggctggacatgatggctcctctacagtcggcagatattggtagcagaattctggcaacttctcgcataaacactgtgcctcacttactcggtgcatcgcatctataccctgtaaatccgctgaatagcgacgattgctgggccatgctcaaggaacatgcttttccaagtggtcacgagaatgcctacccagatcttcacccgatagggaagcagattgctgcaaaaatcaatgggtcacctctggctgccaagctggtgggaggtttgctgggagatacaaggagcaaaaaacactggatgaagatcatgaaaacaggattacaagacaatgctcttctccctgccctgcgcttgagctataagtacctaccggtacacctcaagcggtgcttcgcatattgcagtttgtttccacagaactataagtttgatccaacacagttgtcccgcctttggattgccgagggctttgttcaaccacaaggcagggctgggaaaagcatggaagacatagccagagaatattttggtctgctcctttcacgctcatttttccaagaaatcaagcttggatccagtacttactacttaatgcatgacttactccatgatcttgcaaagtctgttgcagcggaggactgcttccatattgaggatggcatgaaatgtgacatcccatcaacagtgcgccacctgtccgtcactgtgaagagtctacttggtctcacaagcttcagtgggctagaagagctgctcaccttgttcatccgaccatcacttccctcctcctccagttgcttccaagaggattttgctgtgaatttagaaagtatcttgaagaagtccaaacatttgcgtgttcttgatctcagtggctataactccaaagagttacctcattgcatttatgacttactgcacctccgttacctatctatccatggctccatccagagacttcctgagtcgattggcaagcttctgcatctgcaaacattgtgcatctctgggaaatgttcccttgagaagcttcctgtgagcgttagtatgttggtcaatttgcggcatcttatggttgaaatgaagtatactgcaggactggtaggcattggccggctagcaaaccttcagggatcacttgagctccacactgagaagttggaagggcgcaaaccagaagaattgaggaacattgatggtcttcatgggttagtaataaaatgtctagaaaatgtttcaggctatgaagaagcccgcaaagctgagttgaataagaaactttatcttaattctctgaatttggaatggagctcagctagtagaaatagctcccctcctgctgatgcaaaggtgcttgaaggtctgcggccccaccatgccataaaggtacttaatattagaaggtattgtggcgccaaagctcccagttggctgcagtcactgcagcaactgcgttctttgcgcctcatcaattgcaggagcttgtgcatccttcctccattgggaaatttaggatcactcagatatttacacatgaaggagatgtgtgcagttgatcaaattggacatgagttttatggcaccggtgatgtggcatttccatctctaagtgtccttgaaattgatgatttcccgaagttgtgtgagtgggctggcatagaggacaagaactcatttccatgccttgaaagggtaattctaatggattgtccagaattgatcaaaattcctttgttctgccaagctactcgtgaagttaccatcgaacgaacacggttgataccatatatgaggcttgcacccttttcttcaagttcagaaatgctccagctggacatttgcacaagttctgtcatcctcaatagattactctacaaacatcatatacagtccattgcagtgttaaacataagtggggctgagcagcttgctgctgctgaacaactggggtctctggtatctctgcaaaggcttcagctctctcggtgtaatcttactgaccagactctaagaagctttcttcaggatctgccttgtttgtcttctttggagatcatagaccttcctaacataacatcacttccggtagcggaaacagttaagttctgcacaatgctcactgagttgtgcattcgcaactgtcaatcgctttgttctctatcctcattgcagtatcttgcttcactaaaatatctggtgattgagaggtgccctgaagtatctgcaacatcatttcctgtgaactttatgagcctttcatatctgaaggtgctgagaatgtcgtactgcacagagcttcaatctttaccggatctgccatcgtcactggaaacactttatatctttcggtgccaccctgaattgtccaggcagtcaagaaacatgaaagggcattatgttgagaagcttgcaattgtacctagtgtatcgatcgag

SEQ ID NO: 102 - protein, 1131 aa, Aegilops bicornis
MKPSISMEEAGGLDAASLAEALQLVLSAFRAMEGLAAEIHSCHRTRRKWELTRCRSKVADPELDLLIAHLLQIWSICAGAYPQRAGDKALALQARDAVHFIELLQDKVQYGKLQPSSLVQILSHGSKLLSALRWCGCSRLLVALFASKPTYRFTRGIKAVNQETRKIGNLLCTLPPQPMPDSGRQVLQTGVGVSVGRDKDRDDVVQMLLKPCAKVPAPHMMVSIVGTAGIGKTTLAQMVFNDTRVAKHFDVRCWVSISTSSNRMDLVAEILRSAQPAWDTSDEKMADFQMLQSELRRLVTSKRYLIVIDDICNGMDDTWLDMMAPLQSADIGSRILATSRINTVPHLLGASHLYPVNPLNSDDCWAMLKEHAFPSGHENAYPDLHPIGKQIAAKINGSPLAAKLVGGLLGDTRSKKHWMKIMKTGLQDNALLPALRLSYKYLPVHLKRCFAYCSLFPQNYKFDPTQLSRLWIAEGFVQPQGRAGKSMEDIAREYFGLLLSRSFFQEIKLGSSTYYLMHDLLHDLAKSVAAEDCFHIEDGMKCDIPSTVRHLSVTVKSLLGLTSFSGLEELLTLFIRPSLPSSSSCFQEDFAVNLESILKKSKHLRVLDLSGYNSKELPHCIYDLLHLRYLSIHGSIQRLPESIGKLLHLQTLCISGKCSLEKLPVSVSMLVNLRHLMVEMKYTAGLVGIGRLANLQGSLELHTEKLEGRKPEELRNIDGLHGLVIKCLENVSGYEEARKAELNKKLYLNSLNLEWSSASRNSSPPADAKVLEGLRPHHAIKVLNIRRYCGAKAPSWLQSLQQLRSLRLINCRSLCILPPLGNLGSLRYLHMKEMCAVDQIGHEFYGTGDVAFPSLSVLEIDDFPKLCEWAGIEDKNSFPCLERVILMDCPELIKIPLFCQATREVTIERTRLIPYMRLAPFSSSSEMLQLDICTSSVILNRLLYKHHIQSIAVLNISGAEQLAAAEQLGSLVSLQRLQLSRCNLTDQTLRSFLQDLPCLSSLEIIDLPNITSLPVAETVKFCTMLTELCIRNCQSLCSLSSLQYLASLKYLVIERCPEVSATSFPVNFMSLSYLKVLRMSYCTELQSLPDLPSSLETLYIFRCHPELSRQSRNMKGHYVEKLAIVPSVSIE

SEQ ID NO: 103 - DNA, 3189 bp, Aegilops bicornis
  CDS (1)..(3189)
atgacaggggttctgaatgccttggcatcttacgtgaccaagatgctcgccgacatggctagagaagaggtggccatgctgatcgggatctcctgcgcgatcgccgatctgaccatcaagcttggggacctcaagaatttccttgctgacgcagataggagaaacatcactgacgagagtgtccgggggtgggtggaggaactgaagcatgccatgtaccacgctaccgacatcatcgatctgtgtcagctcaaggccatggagcaaagtccatccgaggacatcgggtgtcttaaccccttgttctcatgcatgcaaaatcctctccatgcacacgacattggcagccgcatcaaggcactgaacaagaagttggataacatcagcaagaggggtcgtagtttcaatttcatcaagcttgaagtctaccaggaccagaagacaaatcggcctcatggtattgaccgcaagactaatccattgttggagcggtcgggcgtggttggggagaagattgaagatgacacgagatcacttgttcagctgctcacgaaggaagtcattgacacgagtgaaagcatcatggtgttcgccatcgttggtgttggcgggattggtaagaccacccttagcaagaaagtttttaacgaagaagcaatacaaggcaagttcaccaagaaaatatggttaagtatcacacaagaattcagcgaggttgacttattgaggacagccatcactaccgccgaaggaaatttgccaggacctgggggtgggtctcaagacaaaactttgcttgtgccggctcttgcgagtgctatcaaaaataagaagctatttcttgtgttggatgacatgtggggcacctatgaatggaccaacttgcttaaggctcccattagccacagtgccccgggtagccgagtcctcgtcaccacaagacatgaaactgttgcccgaggaatgaaagcagtaaatccataccaccgcatcaacaaattagggcccaaagatggctggtcattgctcacaaagcaggtactcatgactgagacaagcgaacctgcagtggatatgctgaaggatattggaatgcaaattgtagaaaaatgtgatgggttaccacttgccataaaagtgatgggaggactcctatgccataaggaaaaaacccgacgtgattgggagaaggtattgaatgatgctgtatggtcaatatctcaaatgccagaagagctaaatcatgccatatatcttagctatgaggacttgtccccttgtttaaagcaatgctttctgcacttctcccttaagcctaaaaagatgattttagatgatacacaattcatcgacatgtggattggtgaaggatttgttcatggaaactcggatattttggaagaaataggaactgagtaccatacagagttgaggttgaggaaccttatagagccggatacatcatatgccagtcactatgtttgcaagatgcatgatgttattcgttcatttgctcaattcatgacaagaaatgaagcactggtagttcacaatggagatactgttaatagtaaacttcatttgcaaagctttctccggttgtctatagagactaatggagtggaatcagatgagtttgagtggagaagtttacaagagcaaatatctctgagatcattaatgttaattggaaacttcaaggttcagtctggtgattccttggttaccttttcaagtctgcgtactctacacgtagagtctacagagttcgccacaatggttgaatctctgtatcatctcaaacacttgaggtatttgtcaatggacaggtgcgctgatatagattgcttgccagagaacattcacaaaatgaagttcttacaacacattagtcttgaaggttgtgagaatcttgtgaaacttcctgatagcattgtgaagttaagggaactaagatatcttcaacttgaaggcacaagtatatatagtattcctaggggtttccatgctctaacaaatttaaggacgctatctgggttccaagtacacatggatggtgattggtgtagcttggaagagcttggacctctttcccagcttaggggcattggattagtgggcctggagaatgtatctgatgcttcatttgtcacaaaggttaggcttgatcaaaaagtgcatctttctaggatgcgcttattatccagcactacgcgtaggaagaatcaaggcataattgaggaggtgtttaatgagctatctcctcctccttgcatagaaattatttccgttgaaggatatacagggcgccagctcccaagatggatgatgtcgacaacaacaatgcccctcaatagcttgaggatgctagtgatgaaagacttggcgtgttgcacccaacttcctgatggattatgtcagctcccatggctggagtacctgaaagtcaactgtgctccagcgatcaagtgcattgggccagaatttgtgcgtccccagagccaccgttgctatccttcatcccgcatggtgactgcatttccgaggttgcatgagatggatttattagaattggtggaattggaggactgggaatgggatgaggaagtgcaagctatgccagtcttggttgagcttactttcacaagatgtaatctgaagtgtatccctcccggtcttgcctcacatgcaaaggctttgaaaaagttaaccttgtggagcatgtggcgtctccattcactagagaactttgcttctgttgttgagctcgacctgtatgacttacccaagctgattagcatctccagtttccctgaattgcaaaagcttgagatcaagtcttgccccgagctcacctcactagaggagatgagtgcattacggagacttgtgctgacagttcccggctacggtgaaagattccgtctctcgcccaacaagatgggactccccttgtaccttcaaactgtaaatccaagccatttgctggtggattgcagtctggagatacttggtttcatggccgcaggaaaatctggcagcgagtgggacaagttcagccatatccagcacgttgaggcttatgcagacagtgattgctgggatgacaagaaatggcacgtattgtacacaagggaacctttcagcattgaaacaaatgtgcagcctgcatttccttgcttgctgcaa

SEQ ID NO: 104 - protein, 1063 aa, Aegilops bicornis
MTGVLNALASYVTKMLADMAREEVAMLIGISCAIADLTIKLGDLKNFLADADRRNITDESVRGWVEELKHAMYHATDIIDLCQLKAMEQSPSEDIGCLNPLFSCMQNPLHAHDIGSRIKALNKKLDNISKRGRSFNFIKLEVYQDQKTNRPHGIDRKTNPLLERSGVVGEKIEDDTRSLVQLLTKEVIDTSESIMVFAIVGVGGIGKTTLSKKVFNEEAIQGKFTKKIWLSITQEFSEVDLLRTAITTAEGNLPGPGGGSQDKTLLVPALASAIKNKKLFLVLDDMWGTYEWTNLLKAPISHSAPGSRVLVTTRHETVARGMKAVNPYHRINKLGPKDGWSLLTKQVLMTETSEPAVDMLKDIGMQIVEKCDGLPLAIKVMGGLLCHKEKTRRDWEKVLNDAVWSISQMPEELNHAIYLSYEDLSPCLKQCFLHFSLKPKKMILDDTQFIDMWIGEGFVHGNSDILEEIGTEYHTELRLRNLIEPDTSYASHYVCKMHDVIRSFAQFMTRNEALVVHNGDTVNSKLHLQSFLRLSIETNGVESDEFEWRSLQEQISLRSLMLIGNFKVQSGDSLVTFSSLRTLHVESTEFATMVESLYHLKHLRYLSMDRCADIDCLPENIHKMKFLQHISLEGCENLVKLPDSIVKLRELRYLQLEGTSIYSIPRGFHALTNLRTLSGFQVHMDGDWCSLEELGPLSQLRGIGLVGLENVSDASFVTKVRLDQKVHLSRMRLLSSTTRRKNQGIIEEVFNELSPPPCIEIISVEGYTGRQLPRWMMSTTTMPLNSLRMLVMKDLACCTQLPDGLCQLPWLEYLKVNCAPAIKCIGPEFVRPQSHRCYPSSRMVTAFPRLHEMDLLELVELEDWEWDEEVQAMPVLVELTFTRCNLKCIPPGLASHAKALKKLTLWSMWRLHSLENFASVVELDLYDLPKLISISSFPELQKLEIKSCPELTSLEEMSALRRLVLTVPGYGERFRLSPNKMGLPLYLQTVNPSHLLVDCSLEILGFMAAGKSGSEWDKFSHIQHVEAYADSDCWDDKKWHVLYTREPFSIETNVQPAFPCLLQ

SEQ ID NO: 105 - DNA, 3741 bp, Aegilops bicornis
  CDS (1)..(3741)
atggttaccgcgattgcgtttgccgggaaggcggtggcaacggcttccatctccttcctggttaccaaggctttcgactatctcgacaagtaccacaagtccgaaggcatggaggagctcaagaaccggctgctgctggccatgccaaagatccaggccgtgttcgatgtcgtcaacccagaccaagtcaaggagcagagccctaaactggacgcgtggctttggcagctcagggacgcggtcgaggatgctgagaacgccgtcgatgagctcgagtactatgagctggaagagaaggccgaggaaagaaaggttactgattggggctcttctcttgctaagatgaatcataaacttgtccgatctgttaagaatgttagtattgtggacaagaccctcaagaatttcgctcaccgcgacactctcaagagagtgaaaaaggctgtggaaggtttggacagatctgctgcagatgtggtcagtttcctcgccgtggcaaaccatctcaaagggtctgcttccaccagccagcacctagttaacaatgatcgcgagacaagctctgaattgagtgcatctgaatttgttgggcgagaacaggagatggagaagatcattggatggatagccaagacacctgttgaggcggttgaaactgtgacaaacaccaatagcgtgtctattatttcagtggttggtcatggtggtatgggaaagactactttagctcagagcatatgcaaccaagatgtagtgcggaatcattttgaggtcatctgggtcaccgtgtctactaactttgacgcaacatccttgacaagtaaaattctagaatctgctacaggggaaaagccacgttctgatcatccggaaccattgcaaaaacatctaaaagagaagctgaaacctatgaagttcttgctagttttggacgatgtgtgggaggatcaaaaagaagatgaatgggctaaactatttgctcctctcagaaattttgtcaacgccggaagcaaaattctgttgacaaccagaatgcgatcagtagcagacatggccacaagcgtgatgggagttgaaggtcgatggttgacactacaaggactagaagataatgaaaatattgaactattcaatcatcatgtgtcttctgggctggatccgcaagagtgcgaacatttcaaattaattggagagcaaattgcaaggaaactaagaggatgcccattggtaacaaaggttatcgctgggcatttgcgaggtaatatgatgattgaatactggaacagattcttgcaagaaggattaaaaaaaaatagtggaactgaagaggatatcatgagggttctcagattaagctactatagcctaccaatagagcttcagatttgtttccgatactgttgcatatttccacaggactatgagtttaaaaagaaagaattgatccaaatgtggatgggttcgggattgatctcgcagcttgcaagtgactcacaaaattttgaggatattggagaacaagttttggttcagctgaataaaaagtcgtttttcgatctgagatctagagtaaatcctttgaggggaataaaagaagaatactatgtaatgcatgacttgatgcacgatttagcaaggaatgtgtcctctggtgaatgtgcaagaattactcatcctgccatgtttgaagatgataaccttacggtcagacacatgtgcattgctaatattcacaacttttctgttgacgaggtcaggaaaatctctaatttcaagtatatgcgcactattatctttgatgatactgaacatgcggttcaaaaggatgtagcttgtgcacttgaaagagttgttgaaagcttgaagtttttgcgtctctttagttcaagactgagagatccttaccaagacttaggcctggctattaaatgtggtaaattgaaacaccttcgctatctcaggttgcaacggataacaccagaggggatacgcggggttgttagactgtatcacttgatgctattttactacgacaatgtttggcagaatgaaacaaaaaaagtcttacaagtgagatatttggggaaccttgatcgcttgcgatatgtttccgaacatggtggacttggtgaattccctattgccagactgacgcatcttcaggagttgaataactactgggtagaagacatcatagacaacaaattaagtgtagtcaagtgcttaagaactctccgcacgctaaaagtaagcgggcttgagaatgtcaagaatcctgaagaagctaaggatgtcaagttgaatgaaattacttctctcaattcgttgtctctcagttggtcattgtctgacagttcgtctggcgaaccgaacaatacagatgagttagttttggaccaccttgagccacattgtaatgttagggaactggaaatttcaggttacactggcgtcaaacttccattttggattgaggacctctctgtcaaaaatctggtgttacttaagttggaactttgcttaaactggaaatgtctcccctctcttagaaagctagtatggctcagacatattatattgggaggacttggtagtctgcaagagattggtgatttgtctagtaatacctccacggacttcctacctccaaggcttgaaattctagaagtcattaagtgtccagaattaagggaactacctgttctacctccaagcttggtgtgtttgagtataacatgtgttggactgaccaaactccctatgattgacagtaagagcagcgagagtgagactaagccatcaaagttaatgaacattgaagtctggcattgttgttctataacttcactagaagggagtcttctagagcagaagatgtacatgggagctctcgagtacttaacaatcgcattctgtgacaagctggagtttggatccatagcatttgaaggaatgaatagacttacaaaacttgttatcaagggttttccaaagtttagcaccatgggaactatcaaaggagagttcacttacctcaaccggctcgagctaatttgctgctccggccttgtatccctcccctcagaagacgtgttcatgggtttcaagtcactacggtatatgatgataggtggatgcgatgatctctcatccttgggaggtctcggctcccttccatccctcccttacttatgcatcaatagctgcattaaacttgtggaggttgggtcctccctaccggcggctccacatgcatctggtggcgaggaggatcatgtggtgcagatatacaaacttgaggtcgaccttccatccctgctgcatgtcgagccgctcaatagactccgccgcaccacagagttggacatcattgaagggtcacagatggaaagcttacctgagcattggctgatacagaaccgccaattcctccgacgcctaaggatatctcaggccaggtccttgaaatctctcccaccgagcatggaggaactctcctcgctggaagagctccgtatagaggtagacgattcacaactgtcgaacaacatcagagtaaatagcaactctgaattgaacaaggtttcacacattcatcgagtggaaatagttaaatggccctcttatggagtggaaggagattggttctccatcatgggcgtggaatgcgacagggagacttattaccgcttaaggaatgaggatatcggtgtacttacttcctgggtgaaccaacaaaaa

SEQ ID NO: 106 - protein, 1247 aa, Aegilops bicornis
MVTAIAFAGKAVATASISFLVTKAFDYLDKYHKSEGMEELKNRLLLAMPKIQAVFDVVNPDQVKEQSPKLDAWLWQLRDAVEDAENAVDELEYYELEEKAEERKVTDWGSSLAKMNHKLVRSVKNVSIVDKTLKNFAHRDTLKRVKKAVEGLDRSAADVVSFLAVANHLKGSASTSQHLVNNDRETSSELSASEFVGREQEMEKIIGWIAKTPVEAVETVTNTNSVSIISVVGHGGMGKTTLAQSICNQDVVRNHFEVIWVTVSTNFDATSLTSKILESATGEKPRSDHPEPLQKHLKEKLKPMKFLLVLDDVWEDQKEDEWAKLFAPLRNFVNAGSKILLTTRMRSVADMATSVMGVEGRWLTLQGLEDNENIELFNHHVSSGLDPQECEHFKLIGEQIARKLRGCPLVTKVIAGHLRGNMMIEYWNRFLQEGLKKNSGTEEDIMRVLRLSYYSLPIELQICFRYCCIFPQDYEFKKKELIQMWMGSGLISQLASDSQNFEDIGEQVLVQLNKKSFFDLRSRVNPLRGIKEEYYVMHDLMHDLARNVSSGECARITHPAMFEDDNLTVRHMCIANIHNFSVDEVRKISNFKYMRTIIFDDTEHAVQKDVACALERVVESLKFLRLFSSRLRDPYQDLGLAIKCGKLKHLRYLRLQRITPEGIRGVVRLYHLMLFYYDNVWQNETKKVLQVRYLGNLDRLRYVSEHGGLGEFPIARLTHLQELNNYWVEDIIDNKLSVVKCLRTLRTLKVSGLENVKNPEEAKDVKLNEITSLNSLSLSWSLSDSSSGEPNNTDELVLDHLEPHCNVRELEISGYTGVKLPFWIEDLSVKNLVLLKLELCLNWKCLPSLRKLVWLRHIILGGLGSLQEIGDLSSNTSTDFLPPRLEILEVIKCPELRELPVLPPSLVCLSITCVGLTKLPMIDSKSSESETKPSKLMNIEVWHCCSITSLEGSLLEQKMYMGALEYLTIAFCDKLEFGSIAFEGMNRLTKLVIKGFPKFSTMGTIKGEFTYLNRLELICCSGLVSLPSEDVFMGFKSLRYMMIGGCDDLSSLGGLGSLPSLPYLCINSCIKLVEVGSSLPAAPHASGGEEDHVVQIYKLEVDLPSLLHVEPLNRLRRTTELDIIEGSQMESLPEHWLIQNRQFLRRLRISQARSLKSLPPSMEELSSLEELRIEVDDSQLSNNIRVNSNSELNKVSHIHRVEIVKWPSYGVEGDWFSIMGVECDRETYYRLRNEDIGVLTSWVNQQK

SEQ ID NO: 107 - DNA, 2622 bp, Aegilops bicornis
  CDS (1)..(2622)
atggccgagtcggccgtcagcgcggtggtcggcaacgtgagtacacttgcgcttcaggagaccacgctgctgtgtggcgtcagcactgaagtggagttcctgaaagatgagctcaagcggctgcaaggcttccttagggacgccgacagaaaacgaaggatgggagattcgggtgttgctgtcttggtgagccagatcagagacgcggcgtatgaggctgagaatgtcatcgaagctgcagaccacatgcaaaagagaaacagattgaagaagggattcatgggcgccattgcaaggtatgctcgtctaccaagtgatttgagtacccttcacaaagttggtgttgaaatcaaacgtgtaagaaggaagatatctgagatatttgagagtgcaaagcttttgaaaataatggatttggggaatggttcagtggaaaatgctcatgttaatgatgagttccaacaagactatggtcctatgtaccaaagctttgaagatattgaccttgttggtttcgaggaggaatacaaagaaatagtgaagaagttagttgacactcaagaccatcttagcctcagtgttgtctccatagttgccatgggtggggctgggaaaacaacacttgctagaaaagtctacacttcatctagagtcaagcaacactttggggaaattgcttgggtgactgtatctcaaaagtacaagggagttgatttactaaaggatatcttcaaacaaataatgggtggcaaagatgagtcagttgataaaatgaatgagtatgaggtggggaaaaagatccatgattttttgttgcaaagaagatacttagtagttctcgatgatgtgtgggaaacagatacatgggagcaactaaataaaagggttaaagtttttccagatgcaactaacggtagtagggtaatgctaaccacacgaaaggaagatgttgcaaatcatgttcagatgccaacccatgttcatcagttgaagaagttagacgaagagaaaagttgggaactctttagcagcaaagctttaccaccatacaaaagatctgccatacgtgatgtggatgagtttgaaaaacttgggaaaaggcttgcaaagaaatgtgatggattgccgcttgcacttgcaattttggggggttatctctcaaagaatctaaatgcaaaaacatggtctgatatactgtctgattggccatcaaccaagaatggacagatgatgcgagacatattggctcgcagttacaaggacctaccaaaccattacttgagatcgtgtttactttatcttgctgctttccccgaggattatgaaatgtatgtgtcggatcttattaaattgtggatagcagaaaacttcattccacatgtaccaaagcatagactagaagaaacagcaaggaattatgtaaccgagttggctcagagaagcttggtacaagttgttgacagaagtagggcacatggatggattaagaaaattcggattcatgatattctacatgactggtgcatggaagaagcaagacaagatggttttcttgatgctatcgacaaaacattaggccgagctgatgcatcatcatcatgtgatgaattgataacttatcgttttagtttccaaactttgagtcatcagaatttacctgagaaacctcatgtccgaactctgcttgggtttgaacttgaatcagtgtccctccctaagctgagattcttgagagttcttcacattgaaaactcaacattagaatatttatccagtgtaattggtgtgtgcattcacctaagattgcttaagttgaaaaagtgtgagcgtgtggcgctcccttcttcaattggaaaactcctttacttgcagactatagatctaagaggaacaaatttggattcagaagtaccaaaatccttctgggatattcctacactaaggcatgtgtaccttagcaatgtgttttacccaccaccatctgcagggagtatgcaacaacgtcacagagagctacagagctttaagttgggatcgtcacctatgccactttatcgtgacatagcaattttgttgagccagatggatcaactaacaactttgggcttgataatgaggcacataccctccgaggtgattaacatacttgcaaacatgtctcacctggttgatatttgtgtcttcacatttgatatgctcgataagctgcccactgagttcccacaaggcatacgtcgtcttaagctatgtgccgttgtcatgaaacaagacccaatgccgatcctggagaaccttccatgtcttgtggtcttgtggttgtcggggtacaaaggtcaaaccacgtattgctctgcccaagggtttccgcggctccaagaggtggaacttgacagattttccatcgaggagtggaggatggaggaaggggcaatgccaaagttgtctcagctcatactatgtgaatgcgagaagatgaccaagctcccggaggggttgctgcaccttccgtccctaagtcacctagtactggacattatgccccagatttctgacgatgacagtacattaaaggaactggagcggaaaggatgcaagttgatgcagtataacgacgactgcgat

SEQ ID NO: 108 - protein, 874 aa, Aegilops bicornis
MAESAVSAVVGNVSTLALQETTLLCGVSTEVEFLKDELKRLQGFLRDADRKRRMGDSGVAVLVSQIRDAAYEAENVIEAADHMQKRNRLKKGFMGAIARYARLPSDLSTLHKVGVEIKRVRRKISEIFESAKLLKIMDLGNGSVENAHVNDEFQQDYGPMYQSFEDIDLVGFEEEYKEIVKKLVDTQDHLSLSVVSIVAMGGAGKTTLARKVYTSSRVKQHFGEIAWVTVSQKYKGVDLLKDIFKQIMGGKDESVDKMNEYEVGKKIHDFLLQRRYLVVLDDVWETDTWEQLNKRVKVFPDATNGSRVMLTTRKEDVANHVQMPTHVHQLKKLDEEKSWELFSSKALPPYKRSAIRDVDEFEKLGKRLAKKCDGLPLALAILGGYLSKNLNAKTWSDILSDWPSTKNGQMMRDILARSYKDLPNHYLRSCLLYLAAFPEDYEMYVSDLIKLWIAENFIPHVPKHRLEETARNYVTELAQRSLVQVVDRSRAHGWIKKIRIHDILHDWCMEEARQDGFLDAIDKTLGRADASSSCDELITYRFSFQTLSHQNLPEKPHVRTLLGFELESVSLPKLRFLRVLHIENSTLEYLSSVIGVCIHLRLLKLKKCERVALPSSIGKLLYLQTIDLRGTNLDSEVPKSFWDIPTLRHVYLSNVFYPPPSAGSMQQRHRELQSFKLGSSPMPLYRDIAILLSQMDQLTTLGLIMRHIPSEVINILANMSHLVDICVFTFDMLDKLPTEFPQGIRRLKLCAVVMKQDPMPILENLPCLVVLWLSGYKGQTTYCSAQGFPRLQEVELDRFSIEEWRMEEGAMPKLSQLILCECEKMTKLPEGLLHLPSLSHLVLDIMPQISDDDSTLKELERKGCKLMQYNDDCD

SEQ ID NO: 109 - DNA, 2916 bp, Aegilops bicornis
  CDS (1)..(2916)
atggaggctgccgtggcgagcgctctgaccaaggaggtggtgctgaagctggtggcgctgctgagcgagaatcacaagctgtcgaggggcctcaagaacgacatccgcttcatccggaccgagctcgacatgatctccagcgccagggacagccacatggcgatggcggcagggcgggatccggcgagcagctcctcgcgcatatccatggaggagatgcgtgatctggcgcacgacatcgaggattgcatagaccggttcctgccctgcccctgcgtggcctgccagggtcagggtgaggccgcgtccgtcctccgccgcgtcaagaaggcggccaccagcgccagatcccggttcgcggccgagatccacaagctccggagcaggctcaaggacgcccacgaccgaagggtcaactaccaagccgtcaacggatcccccgccggagcttctccggcggccgcggacacgggggcggagactgaccccgtgggcatcgacgagccaaagcaggagcttgtcgacatcttgttgcagcagaccgggccggggaagcccggtgtgatatccatcgtcgggttcggcggctccgggaagaccacgctcgcgagggcagtgtatgagtgccccggagtcgtccggagattcccctgccgcgcctgggctgcggcctcggagcacagagacgccgacgggctactcaccacgatactccggcaactccacaccgccgatgcgccgctgccccaaatttccatggatggttttctgcggaggacagagtgtttaattgtaatcgatgacatcaacaagcagcactgggatgtcatcaaatccatcttacccagggaaacaaaaagcagaattatagttaccacgtctctccagtcagtacctaatgcttgcagctcaggtgatggttatgtttacaagatgagcattcttaacgcggagcactccaaggttttgctaaggaagaaggttttcttccaaggatgttcacctgaactggagcggggttcaacagcaattgtggagaagtgtgatggccttccacttgctcttgtttgtgtggccaattttttgctaggcgagaatgagctcacgggaagtcactgtgcccgagtttgccgcagcctcgggcatcatatggagaaggaagcagacttcacaaaattgcaacaggttcttgtaaataactacagcagcctgtctggttatcctctgaggacttccttgctatacacgagtgtgttcccaaatggtcgcccaatcaggaggaatactttaatcaggcgatggctagctgaagggcatgtccagtgtcaatataaacgcagtgatctggaggtagcagatgaaaacttccgggaacttattgaccggaatatcatccggccgatcgatgctagcaacaatgcaaaagtgaagacgtgcaaaactcatggaatcatgcacgagttcatgctgcacaagtcaatgtctgataacttcatcacatctcttcatgatcacaatcgaagtaatttccgtcacctgttcatccaaaaccatgcaagtggcagcaccttgagctcgaaccagcgtacaagtccagcaagcgatgatgcagctggcagtgagaaattccgcgcccggtctctgaccatctctggggatgcgggagaagctgcttctgagttttgcaggtgcgagctgctgcgagtgttggatctggaagaatgcaatgatttggaggacagtcatctcaaggacatacataagctgtggcatctaaagtatctgagccttgggggcactatcagcaaccttccgaagaaaattgacaagctacactgtttagagaccctggatctgaggaagacaaagatagagatattgccagtggaagtcattgggttgcctcacctagcttacctgtttggaaagtttaagtttgggaaaaaagacttgagaaagagtgaaatagctgagttctcgcaaaggaaaagtaagttgaagtctcttgcaggattttgtgcagatggaaaccctgggtttctacaactgatggctcatatgaaagaactgaaaaaggttaagatatggtgtgaatccactggcgcagacaacaaaggcttgcctgacatttcaaaggcagttcagaagtttgctcaggatggcatggatacaaacggcgttcgttctctgtcactcaatcttgggaataccatgggtgacttcctgggttctattcaagaatattgttatcttagctcgctgaaactgcacggtcagcttagtgtattgcctcagttcgttacatccttgtgtggcctcacggagttgtgcctttcgtcgactaatctgatggggcatgatctatcggacctgcgcaagctgcgctacttgctttacctcaagctggttgaggctgaccttgggagcttcaccatagacaatggggacttcccaagcctgcgacgcctatgccttgtggtgaaaatgcccatcctccctgcaatcaaacagggagccctgccgtaccttgtctcactccagctgctctgcaaggacctctttgatctgtcaggcatgaggatcgagttccatgattgtcttgaggaagttgccctcgattctatggtcagtacaagaacggcagaaatgtgggaaaccgcagcgaagaagcatcccaagagaccaaaagttgtgtttcttacaaggattgatccgagcgaacccgagtctgatgtgaaatacgtcgcggcggatgggccaacacgtgagaaatgcatagtcggttcgcctcagtcaggttcaacgagcaaacacggtccgtatctgaagaagacggttgtttcagaaccccctcgggctgcatccgagctgtccagtgctgggaacggcgtgatgcctcctcctgcaagcatatgt

SEQ ID NO: 110 - protein, 972 aa, Aegilops bicornis
MEAAVASALTKEVVLKLVALLSENHKLSRGLKNDIRFIRTELDMISSARDSHMAMAAGRDPASSSSRISMEEMRDLAHDIEDCIDRFLPCPCVACQGQGEAASVLRRVKKAATSARSRFAAEIHKLRSRLKDAHDRRVNYQAVNGSPAGASPAAADTGAETDPVGIDEPKQELVDILLQQTGPGKPGVISIVGFGGSGKTTLARAVYECPGVVRRFPCRAWAAASEHRDADGLLTTILRQLHTADAPLPQISMDGFLRRTECLIVIDDINKQHWDVIKSILPRETKSRIIVTTSLQSVPNACSSGDGYVYKMSILNAEHSKVLLRKKVFFQGCSPELERGSTAIVEKCDGLPLALVCVANFLLGENELTGSHCARVCRSLGHHMEKEADFTKLQQVLVNNYSSLSGYPLRTSLLYTSVFPNGRPIRRNTLIRRWLAEGHVQCQYKRSDLEVADENFRELIDRNIIRPIDASNNAKVKTCKTHGIMHEFMLHKSMSDNFITSLHDHNRSNFRHLFIQNHASGSTLSSNQRTSPASDDAAGSEKFRARSLTISGDAGEAASEFCRCELLRVLDLEECNDLEDSHLKDIHKLWHLKYLSLGGTISNLPKKIDKLHCLETLDLRKTKIEILPVEVIGLPHLAYLFGKFKFGKKDLRKSEIAEFSQRKSKLKSLAGFCADGNPGFLQLMAHMKELKKVKIWCESTGADNKGLPDISKAVQKFAQDGMDTNGVRSLSLNLGNTMGDFLGSIQEYCYLSSLKLHGQLSVLPQFVTSLCGLTELCLSSTNLMGHDLSDLRKLRYLLYLKLVEADLGSFTIDNGDFPSLRRLCLVVKMPILPAIKQGALPYLVSLQLLCKDLFDLSGMRIEFHDCLEEVALDSMVSTRTAEMWETAAKKHPKRPKVVFLTRIDPSEPESDVKYVAADGPTREKCIVGSPQSGSTSKHGPYLKKTVVSEPPRAASELSSAGNGVMPPPASIC

SEQ ID NO: 111 - DNA, 2967 bp, Aegilops longissima
  CDS (1)..(2967)
atggcagcacaagcaatggtgaccgcatccacaggggcgatgaactctgtcctctcaaagctcgctaccctgctggaggatgagtgcaacccgcacacgaggaacaggatcattgccctaaggtgtgcgctgaccagcatgagaagcttccttgagaggagggcggcggctagtatgaaagatatggatccattggtcgaggggtggatgaagcaggtccgggacatgacctatgatttggaggattgcatcgacgatttcgtgtgctcagatgccccaggtaacaccaacagtgtagctcagctgatcaaggtggtaacatggaggcgtcagtacaccagcctgctgcaagaactcaaggaacaagtctctggggcatctgagaggcgctggaggtacgggatcgtctgcgatcctggggatccgttgcccataccttctgctgtaatcaatggtcttctacccgtcttcagtgctcatgtggggtgtggacttgtcggtatagaaggctcgagggaccgactgatcaagttgctggatccagatgacaagaaacagctgaagatggtgtcaattgttggatccagaggtatcggcaagactacgcttgccatggatgtgtatcaaagcctcaaagagagatttaattgccataccatcgtctcagtgtccagcggtgatgatctgaggattattcttacaagtatactatctcaagtcggcgtgcaggaacatgacttcagagaatgcgatgaggaacagctcatccataaactaagtgaactcctcaaaactaggaggtatttcattgttattgaagatatatgggacgtatctgcatggaaaataatcagatgggctttccctgataatggttgtggcagtagaatattggtcacaacgtgcatcagttccatagccagcccaagctgctattttggcaaagacgatatatttaaaatggtacctcttagtgacactgaagccagaaagttatttttcatgcgaatatttcaccctgaagattgctgtcctcttcgtttgaaagaaatttcttttgatatcttgaagaaatgtgatggtatgccactagcaatcattactatagctagcttgttagctacgaaatcaaatgaaaatgagtggaagagagttcgagatgctattggctccgtatttggtaaaagtgatactccagaaaggatgaagcagatactaaattttgcatattttgatctccccgtccatttaagaacatgcttgttatatctgtcgatctttccaaaaggttatgttattaataaggcacagctgatacggagatggatgggtgaaggttttattattgaagaacatgtaaagagttcagaggaagtaggagagtgttatttcagtgagcttgttagcaggggtcttatccaaccagtttgcatccgatctgatggtcgaatagaatcttgccaagttcagaacatgatttgggatttcattttgtctaaatcttctgaagagaattttgtaaccagatatgatgatcgtcatggcatttttggactacaagacaggattcgccgcctatccctttattgtggtcatcatgaaaaagatagctttatcctatctgcaataactgcttctcatattcgatcgctcaccattgttgtgactgataaagagatgcctactcttgcaaactttcaagcacttcgagttcttgatgttgaaagtagtggggagttggaagatgacaattatcttcaagaaatagggaaaccacgcctgttaaagtatctacggcttcaaacaaaaaggttgactgagctgccagaacaagtagcagaactgcagttcctccagacactggatcttactagtgctctgataagcagactgccccacagtattgttcgactgaagcagctgagttatttacttgttaaaaatataaaattgccagatgaaattggagaattgcaggttctgcaggagctctcccatgttgaagttgagagcagcaactcgccaaattctttggaggagctgggccgtttgagtaggttgagggttctcgggctaaattggtgcattagtgacacagatatttctatggaaatttgtgcggatagcttgatctcctcacttgacaaactcggcagttccaacctccaatctcttcatattggcactggttcagggtgttccctggattttttgttggattccttgtctgctccttttaaccacctccatgagtttcggatgacctctgattactattttccaaaaataccgggatggatgaacacacttgttagcctcagagttctggagatcaacattgatacagtgggagaggaagcacttaagatccttgggaaattgccttctctgctagttctcttgctgtcggtgaaatcttcagctcagaatcaaggactcatcatcacaagctgtggattccgatgtctaaagcaatttgacttcatttgttcgaatgttttggacatggtgatgtttgaacaagggagtatgcttgcactggaaaatctccacctcaagtttcgagtaaaaggagtgtctgtgcattatggttttcagtttggcattgagcacctcgcttccctcagatatctccatgtagatattgactgtgaggacgcagaggctagggaggtggaaactgcagaggattctattaggagtgcaatcagcgctcatcctggtcatcctaggcttgaagtctggaggttgggggaagacgaagtgatgataagcgaggtggagatcactaatcatggtgaagggatagagggtcccaatgataagaagtgtgaagaaatggtggaagaggacctcatttctcctgctgtaagaccatggtggctcctccctgcatggtgtatcatatccatagtgtggatggtctcctcatggggggtcatctccacatggggggtcatatccgca

SEQ ID NO: 112 - protein, 989 aa, Aegilops longissima
MAAQAMVTASTGAMNSVLSKLATLLEDECNPHTRNRIIALRCALTSMRSFLERRAAASMKDMDPLVEGWMKQVRDMTYDLEDCIDDFVCSDAPGNTNSVAQLIKVVTWRRQYTSLLQELKEQVSGASERRWRYGIVCDPGDPLPIPSAVINGLLPVFSAHVGCGLVGIEGSRDRLIKLLDPDDKKQLKMVSIVGSRGIGKTTLAMDVYQSLKERFNCHTIVSVSSGDDLRIILTSILSQVGVQEHDFRECDEEQLIHKLSELLKTRRYFIVIEDIWDVSAWKIIRWAFPDNGCGSRILVTTCISSIASPSCYFGKDDIFKMVPLSDTEARKLFFMRIFHPEDCCPLRLKEISFDILKKCDGMPLAIITIASLLATKSNENEWKRVRDAIGSVFGKSDTPERMKQILNFAYFDLPVHLRTCLLYLSIFPKGYVINKAQLIRRWMGEGFIIEEHVKSSEEVGECYFSELVSRGLIQPVCIRSDGRIESCQVQNMIWDFILSKSSEENFVTRYDDRHGIFGLQDRIRRLSLYCGHHEKDSFILSAITASHIRSLTIVVTDKEMPTLANFQALRVLDVESSGELEDDNYLQEIGKPRLLKYLRLQTKRLTELPEQVAELQFLQTLDLTSALISRLPHSIVRLKQLSYLLVKNIKLPDEIGELQVLQELSHVEVESSNSPNSLEELGRLSRLRVLGLNWCISDTDISMEICADSLISSLDKLGSSNLQSLHIGTGSGCSLDFLLDSLSAPFNHLHEFRMTSDYYFPKIPGWMNTLVSLRVLEINIDTVGEEALKILGKLPSLLVLLLSVKSSAQNQGLIITSCGFRCLKQFDFICSNVLDMVMFEQGSMLALENLHLKFRVKGVSVHYGFQFGIEHLASLRYLHVDIDCEDAEAREVETAEDSIRSAISAHPGHPRLEVWRLGEDEVMISEVEITNHGEGIEGPNDKKCEEMVEEDLISPAVRPWWLLPAWCIISIVWMVSSWGVISTWGVISA

SEQ ID NO: 113 - DNA, 2877 bp, Aegilops longissima
  CDS (1)..(2877)
atggagggcgcggcgcagaccattttgagcaatgttgggcaggttgtggggcaggagttccggcagctcagcggcgtgggtggcgaggtcgctgagcttagggacgagctggcgaccatgaacgccgtccttcgcatgcagtctgaagccggggacggtgccgtggaccacttcgtccgggagtggatgaagcagctgcgggagctcgcctacgacgccgaggattgcgtcgacctctatttattccggatcaggtgccggccgggcgacggcttactcgtctggtccaagcgcctgcttgtgacgcttttccatcgccatcgtctcgccggtgacatcgcagccctccgcgcccgtgccgtcgccatcagcgagcgccatgctcgttacggcgtcggccgcgagacgctgcggtgccctgcttcttccgccccagcgccatcgtcggcgtatgagctccctcttgccaagcactccaacctgttggtcggcatcagggaccaggctagcagcctagtcgacaaggtgaaggcgttggatgagaacgacaaggagctcaaggtgttctctgtcgtcgggttcggaggccttgggaagaccacgctggccatggaggtctgccggcagctggagacggagttccagcgccaagcgcaagtgtccgtgtcccaggcgttcaccgggaaggacctcagggaattcctgaagcgcgtgcttctgcagatcgcgcagccgaagcagacggcgcacaaggagccccaaaatgcagccgatggcgccggcttgggtaacgtcgacgacatggatgtaccccagctggaaagcaagctcaaagagattctcgagaacagcaggtacctcattatgatcgatgatgtttggagtatagcagcctgggatgcaatccgttctaggttaccaagcagcaattgcggcagcagaatcattgtgaccactcggatagatactgtggcaaaagcatgcagtgctaatgatggttacatacatcatatgaaggccctcattaagaaagactccatgaagttgttcctttgcaaagcgtttggctcaatgactgataactcgtgccccgaggatttgaaagtagaaatggataacatcttaggaaaatgtggtgggctaccattggccattgttagcattgccagccttctatcaagctataaacctcctgaaggcaaagatatgtggacaaaagttcaggaatcaattggttcactgatggaaaacaacccttcccttgaagggatgagaagaatactcacacttagctatgaccacctacctcatcacctcaagtgttgcatgatgtaccttagcattttcccggaagattatgtcattccgaaagatcggctgttgaggagatggattgctgaaggattggttgcggagaagcgggggatgacccgtatggaacttgcggaagcctacttcagtgagctggtcagtagaagcatgattcagcgggccgctgatatagtcacctggcatgatgggagggtagagacatgccgtgtgcacgacatgttgcttgagatcatggtgtccaaatccctagaggctaattttgttagcctggtgggtggacagtatgaagggatgtcgtatgacatggctcgccgtctctccatacatggtggagcagaggcacccaaggactggtcatcaaagaaaaatgcagtgcaccgtggtacaaggagcgacatcaaggtgatgactgtgcagcatgtccgatcactaagcatatttgatcctgaagtgcacaagctgctgcttggtcggctaggtgagttcaccttggtaagggtacttgatctggaagattgcaagggcctagaaaaaaagcatatgaggcatatctgcaggatgtatcttttaaggttcttgagcttgaagggcacagatatcaaggagatgccttcgagagttggtgatctcgagcatttgcagacacttgatgtacgtcaaacacgccttaagtgtttgccaaaaacggtaacaaaactagagaagctggagcacctgctgttctccatcaagggtacgttctggtctgggtggatgctgccccaagggatcaacaaaatgaaggcactacgccaagtgaataaagcggttgtgatatacgacccaatggtcgccaaggagatcggcgaactggatcagttgcaagagcttggtatctatgtggacacgagagaggatgtaaatcaggaggttcttgaagagcttgcatgctccctgagcaagctatattccctacggtcactcgacattggcaactttggatgtgatcaatggcctttcaagcagataatgcaatttctgcatgatgtgaaatcgccaccacgacttctccaataccttaggatctatggccgcattgacaatttgcccgactgggtgagttcactcgcagatctcgtcgagtttgacatagcgtggacataccttaatggtgagcaactatttaacgtcctgtgtaagttgcccatcctgaagaggctgaccttgggggcttacttctgctggcatcaagaaactattgtgtttggtagtgcccaatcatttccagagctcaaggaactgactctgaactattctcctgaagttccagaagtttaccaatttaagcaagggtccatgccaaagctcgagacactcgaggtgcatttcggagaccaggagaagaaaattgatggcatccagcatttgacaaagctgaaagaggtgcagtacagtggggtgaagaccaacaaagggctgatacttgcagtagaggagctaaatgaggagaatgataggcgacatgagtcagagcagttcaaaattagagtgaggtatgacgacatg

SEQ ID NO: 114 - protein, 959 aa, Aegilops longissima
MEGAAQTILSNVGQVVGQEFRQLSGVGGEVAELRDELATMNAVLRMQSEAGDGAVDHFVREWMKQLRELAYDAEDCVDLYLFRIRCRPGDGLLVWSKRLLVTLFHRHRLAGDIAALRARAVAISERHARYGVGRETLRCPASSAPAPSSAYELPLAKHSNLLVGIRDQASSLVDKVKALDENDKELKVFSVVGFGGLGKTTLAMEVCRQLETEFQRQAQVSVSQAFTGKDLREFLKRVLLQIAQPKQTAHKEPQNAADGAGLGNVDDMDVPQLESKLKEILENSRYLIMIDDVWSIAAWDAIRSRLPSSNCGSRIIVTTRIDTVAKACSANDGYIHHMKALIKKDSMKLFLCKAFGSMTDNSCPEDLKVEMDNILGKCGGLPLAIVSIASLLSSYKPPEGKDMWTKVQESIGSLMENNPSLEGMRRILTLSYDHLPHHLKCCMMYLSIFPEDYVIPKDRLLRRWIAEGLVAEKRGMTRMELAEAYFSELVSRSMIQRAADIVTWHDGRVETCRVHDMLLEIMVSKSLEANFVSLVGGQYEGMSYDMARRLSIHGGAEAPKDWSSKKNAVHRGTRSDIKVMTVQHVRSLSIFDPEVHKLLLGRLGEFTLVRVLDLEDCKGLEKKHMRHICRMYLLRFLSLKGTDIKEMPSRVGDLEHLQTLDVRQTRLKCLPKTVTKLEKLEHLLFSIKGTFWSGWMLPQGINKMKALRQVNKAVVIYDPMVAKEIGELDQLQELGIYVDTREDVNQEVLEELACSLSKLYSLRSLDIGNFGCDQWPFKQIMQFLHDVKSPPRLLQYLRIYGRIDNLPDWVSSLADLVEFDIAWTYLNGEQLFNVLCKLPILKRLTLGAYFCWHQETIVFGSAQSFPELKELTLNYSPEVPEVYQFKQGSMPKLETLEVHFGDQEKKIDGIQHLTKLKEVQYSGVKTNKGLILAVEELNEENDRRHESEQFKIRVRYDDM

SEQ ID NO: 115 - DNA, 2691 bp, Aegilops longissima
  CDS (1)..(2691)
atgggcacacatcctccatatcatatatcccttctcaatgaggatcagtcatgggagctttttcagagaaacgtgtttggaagggaagcggaaaagcaagaggaattgatttcagttgcaaaaaacattgcccacaagtgtaaggggttgcctcttgctatcaagaccatagcagctttacttcgttcaaagcatcacaatcagtggttttctgttctggatagtgatgtctggaaatacgacatcctcacatctactgctattgtacctgcactacagctaagttatgatcacttgtcatccgaagcaaaaatatgcttttccttttgtgctcttttccccaaggataacccaatggacaaaaatatgttaatccagctatggatggcaaatgaatttattgcatcagaaacaagaggccaacaaatctttgatgtgttagtatggagatgttttcttcaattagatgtggagattccagagcatctactctccggatttggagacaagttcatccaccgaccaattacgtgcaagatgcatgatctcatgcatgatcttgctgactccgtaatcggaaatgattgctccagtatacaagagtcttcactatgtgaagaaattttgcaaggatccacatattttagttcattgcagcatggggttcggcatttgtcacttgaccatgtcagtaataataccattgcaatcatgaaggaaattttagctcctcggccccacacgatattagtccaaagtgagtggtggtttgagactcggtatgggacttctctgagtgtggccaagtcaaaattcatgtcattgcgagcattgaagacatactcaatcataacacaaatgacaaacttgaagcatcttcgctatctagattgttcttgttcagctatatcttcacttcctgaagccactacaatgttgtataacttgcaaacactgaagctcattcaatgtacaaaactcatgaaattaccagaaggcatgagatatatgatcaatcttcggcacatcttcctccttggatgtcatcgtttggagcgcatgccacaaggtattggtcagctgaattctctacagacattgacaaattatgtcagtgatagtgatgtaggttgtggaattgatcaactgaaatatttgaatcttagtggtgctctttctttgactaagttgagaaaagtgcatagtgcagaaaatgcaaaacaaagcaatatgtccgctaagcataatgtgaaccgattgtcacttgattgggaaaatggaccttcttatagcacacaagatgggtatgaggtagatgccaatgcagaaggaatattagaggccctttgtcctcatgaaagaattgaagctttaatgttatctaattatagaggtgcaaaattgtcatcatggatgcacaactctgtactgttggaacatcttagtgaactttatctgagtagctgcaagaactgcaaggatctccccccattatataaatgtccctccctcaggtacttgagtttgaaaggttttcataatttgacacgtatatgtgttggtgatgatgatacagacagtgggcaatcatgtacttctctaccacccttctttcctaaattggaatatatgaagctttccaacatgcctaagctagagagatggcacatagaggtgcctggacaagcagcggttgtatcactccctcagctcaagaagctagaaattattgaatgcccaatgctacgaagcatgcccaagatgctccctctgcttgaagatctgctgataaagtgggcaatcgccattcccgcgtaccatttaattaatctgtccatgcaatctaatcttgagtgcaagggcgtcatttcagtggaacctacagttggttggaagcccaacgaacttcatttctcgaggcttggtgactcatatgtgacactgaaactcaaaggtttgaaggacactgtagagcgctttgaagagaagctgaaaagagtaccttccagatttattaagaacttggatatagtagattgcaaatgtcttttctcatctgaacaatctcaaagacagctcaatatatggaaccattttggttttgttaaaacaatctggattagaggcagcaatgatatagtacaatggccagtggtagaacttggaaatttgaatcatcttggagatctacacttgattagttgttccaacttaactggttcacttccatcaagaatatccgatgacgaaaatgtcttgcttcctcaactccagtatcttgacattattgactgcaagaatttggtggaggtaccaaagttgcctgcatctcttgaaatattgcgcatccgttcttgtcccaagctggtgtccatgccaacaattcttgggaatgtgaaaaaattgagagagctcactctgagtgggtgtaacgcgctggtggcatttccagatggaatgtatggagtcactgcactcaggatgttgaagatggtgtggtgcccaagggtagagacactaccggagggactgctgcagcagctccctgccctcgaggacctatggatcatgggctgcccccatttagagggagccttctcaagaggaggcgcttaccaggatttggttaaggctaaagtaattcgagaggcaagacttggcggtgagcttgaaattcacatttgctcacat

SEQ ID NO: 116 - protein, 897 aa, Aegilops longissima
MGTHPPYHISLLNEDQSWELFQRNVFGREAEKQEELISVAKNIAHKCKGLPLAIKTIAALLRSKHHNQWFSVLDSDVWKYDILTSTAIVPALQLSYDHLSSEAKICFSFCALFPKDNPMDKNMLIQLWMANEFIASETRGQQIFDVLVWRCFLQLDVEIPEHLLSGFGDKFIHRPITCKMHDLMHDLADSVIGNDCSSIQESSLCEEILQGSTYFSSLQHGVRHLSLDHVSNNTIAIMKEILAPRPHTILVQSEWWFETRYGTSLSVAKSKFMSLRALKTYSIITQMTNLKHLRYLDCSCSAISSLPEATTMLYNLQTLKLIQCTKLMKLPEGMRYMINLRHIFLLGCHRLERMPQGIGQLNSLQTLTNYVSDSDVGCGIDQLKYLNLSGALSLTKLRKVHSAENAKQSNMSAKHNVNRLSLDWENGPSYSTQDGYEVDANAEGILEALCPHERIEALMLSNYRGAKLSSWMHNSVLLEHLSELYLSSCKNCKDLPPLYKCPSLRYLSLKGFHNLTRICVGDDDTDSGQSCTSLPPFFPKLEYMKLSNMPKLERWHIEVPGQAAVVSLPQLKKLEIIECPMLRSMPKMLPLLEDLLIKWAIAIPAYHLINLSMQSNLECKGVISVEPTVGWKPNELHFSRLGDSYVTLKLKGLKDTVERFEEKLKRVPSRFIKNLDIVDCKCLFSSEQSQRQLNIWNHFGFVKTIWIRGSNDIVQWPVVELGNLNHLGDLHLISCSNLTGSLPSRISDDENVLLPQLQYLDIIDCKNLVEVPKLPASLEILRIRSCPKLVSMPTILGNVKKLRELTLSGCNALVAFPDGMYGVTALRMLKMVWCPRVETLPEGLLQQLPALEDLWIMGCPHLEGAFSRGGAYQDLVKAKVIREARLGGELEIHICSH

SEQ ID NO: 117 - DNA, 1968 bp, Aegilops longissima
  CDS (1)..(1968)
atgaagattatacaaaaatgtgatgggttaccacttgctattaaagttatgggtggactcttaagcacaagggatcctaaggaacgcgactgggaaattgttttacataagaatcttggttggaaagaagaaggcggggaacaagaggaactaaactactcagtaagcttgagctacgacgatttatctgtagagttgaagcaatgctttctgtactactcacttttgccaaaggattcgcgttttacaagtcagagaattgctagcatgtggatttgtgaagggtttgttcagcatgatgggaggtcaaatttagaacaagtcgatctagaacaaataggggctgattatcatcgggagttggtggctaggaatcttttggagctcaattattcaaataataacatatggcagtacaccttgcatgatgttgtccgctcatttgctcaatttatggctaaagaagaagcgttcgtggttcacaaggatcaagttgacattaggaatcttcttccagaaaacaattctatttgccgtctctcgataaaatctactcattcagaactagagtggaccatcctagagaagcaagaaagattgaggacattattattgataggctgtaagatcaaacctggtgtctcattggaaaattttgctaggctacgggtattggatataagctccaaggaatctgattggttagtggactctgtgtgtgagctaaggcacctaagatatctgtcattctccaatacaaatatatctaggcttcccggtgacatccataagatgaggttccttcaacacattcatctccagagctgtacaaagttggaaaagctccctgacaacatcacaaaactagcgtgtttaagatatcttaacttacgtgggtccaatgtagatgttatgccaagagggtttggtggtctaacagatttgagatcccttcatgggtttccagtgaagatggatggggactggtgcactttggaagagttggaggctctgtcacatcttagaaatctttcagtccaaggtctagagaatgtgtctggtagttcagttgcaaaaagggccaagattagcaacaagaagaggctggaatatttggatttaaagtgctacaagtacaaagattatgaagtgcgccaaattgaggtggagcaacaagagataatagaggctgtatttgatgagttgtgcccttcacctgctagattggagacactattgatacgaagatatttcggtcgtcgactaccaaattggttgcagtccccagtggcaacaacctttaaaagcttgaaggatattacactagggcacataacacacagcacccaactacccgatggtttgtgcaagatacacggtttggaaacactacgtatcacgcatgctccagccatcgagcatgtcgggcctgacttccagacccatgatggaggtgttgcattcccaaatctgacaagattggagttggaagccctgtctgaatggaaggagtgggactgggaggaggaggagcagagcaaagtcatagccatgcccgctctggattttctctacctcagggactgcaagctgacacaccttcctccaggacttgctagtgaccgcaggtacaatctgagaaccatgcgcctacatgatctcacgctcctagaatatgtggagaacttcccttcagttgtggagctcagagtgtacgactgccctgagctcaagaggatgagcggcctctccaagctgcggacggtcgacatctgcgattgcccaaagctggagctgctggagggcgtcctggcgctggacagtatggagttggattgggaacactgggaggttactggaccagatgccaggtgcacccccaaggcaaagggatatcaagctgaagacgaactgccgcgtgagctcccacaagatcttgttataacgaggatgaactcgctcaagaga

SEQ ID NO: 118 - protein, 656 aa, Aegilops longissima
MKIIQKCDGLPLAIKVMGGLLSTRDPKERDWEIVLHKNLGWKEEGGEQEELNYSVSLSYDDLSVELKQCFLYYSLLPKDSRFTSQRIASMWICEGFVQHDGRSNLEQVDLEQIGADYHRELVARNLLELNYSNNNIWQYTLHDVVRSFAQFMAKEEAFVVHKDQVDIRNLLPENNSICRLSIKSTHSELEWTILEKQERLRTLLLIGCKIKPGVSLENFARLRVLDISSKESDWLVDSVCELRHLRYLSFSNTNISRLPGDIHKMRFLQHIHLQSCTKLEKLPDNITKLACLRYLNLRGSNVDVMPRGFGGLTDLRSLHGFPVKMDGDWCTLEELEALSHLRNLSVQGLENVSGSSVAKRAKISNKKRLEYLDLKCYKYKDYEVRQIEVEQQEIIEAVFDELCPSPARLETLLIRRYFGRRLPNWLQSPVATTFKSLKDITLGHITHSTQLPDGLCKIHGLETLRITHAPAIEHVGPDFQTHDGGVAFPNLTRLELEALSEWKEWDWEEEEQSKVIAMPALDFLYLRDCKLTHLPPGLASDRRYNLRTMRLHDLTLLEYVENFPSVVELRVYDCPELKRMSGLSKLRTVDICDCPKLELLEGVLALDSMELDWEHWEVTGPDARCTPKAKGYQAEDELPRELPQDLVITRMNSLKR

SEQ ID NO: 119 - DNA, 2373 bp, Aegilops longissima
  CDS (1)..(2373)
atggccgagtctgttgtgggcgccgttcttggtaatgttggcagtcttgctgttcaggagaccagattcttatgtggagtcactcttgaagtgacattcttgaaagatgagctgatgcgactgcagggctacctcaaagacgccgaggacaaacgaagatctggaaatgcaacagttgctatcttagtgagccagatcagggatgttgcatatgaggctgagaatgtcatcgaagctgcagattacatgaagaagagaaacttgatcaagaagggcttcatgggtgcaatttcaaggtatgctcgcttaccgagtgacttgactaccctctacaaagttggagttgaaattcaccgtgtaagaaggaaacttcgtgaagtatttcagagcatagaacgcttgaaaattaacttggatagtcaagttgttgatgagtctctagaagattgtggtcttgtgcaccaacactttaatgatgatgttgtcatggttggttttgagaaagagtacaaagaaatggtagacaaactagttcagggagcaaatatgcttagtcttgtctccatagttgccatgggtggggcaggaaaaacaacacttgcaagaaaagtatatacttcatctaaagtcaaacaacagtttgatgcacttgtttgggtcacagtatctcaaaagttcaaggtcattgatttactcaaggaaattgtgaagcaaataccgaatgatggagatcagactgaaaatattgatgacatgaatgagtatgaagtgggaaagaagatccgtgataccctcatggaaaaaagatatttggtagttctcgatgatgtgtgggaaacagatacatgggagcaaataaataggacaattaaggcatttcctgatgcaactaaccgcagtagagtattgttaactacaagaaaagaagatgttgcaaatcacattgaaatgccaacccatgttcatgctttgaagtgcttagatgaggagaaaagttgggtactttttagtagcaaatctttaccatcatacaaaaggtcaggcatacgagagatgcataagtttgaaaaaatagggagaaaacttgcaaggaaatgtgatggattaccacttgcacttgcaattttagggggttatctctcaaagaatctcagcacagaagcatggtcagatgtactaataagttggccatcaaccaaggacacaaagacaatgcgaggcataatagctcgtagttacaaggacctaacaaatcattgtttaagatcttgtttgctctatcttgctgcttttcccgaggattcgataatatccgtgtcggatcttatgaatttatggatagcagaatgcttcattattcctcatacaccaaagcatacactagaagaaacggcgcgtaagtatgtaactgagttggctcaaagaagtttggtgcaggttgttcaaacaagcagtatacatggatggattgaagaaataaggattcatgatatcttacgtgactggtgcatagaagaagcaagacaagatggtttccttgatgtcatcgatgaaactagtagaggacaagttggcgcaccatcacctcatatcttgatatcctatcgctcttcgcttcaaaacccgagtgatcagaatttatggccatcacataatctccgaactttgcttggcttcggactttcgttagtacctttacctgagctaaggttcctaagagttcttcatgttgagaactcgagcctagaggatttttgtgaggtgattggtgagtgcatccacctacgatatctcaggttgaaaagatgtaaagatgtgatgatccatccttcaatcggcaaactctttaacttgcaaactttagatctgtcatggacctatattagtcagtcaatagtatcaagctccctctgggatatacctactttaaggtatgttgatattcgtaagatttctctaccaaggagtgtgcaaactcaaaaaaatctacgggagcttcatatgtttgctgctgatgatgaaactgaaaaagacccgatgccgatcctggagacacttccttgtcttgaggtgctagagttggatggttatcaacccgaaaccatgtcctttggcgcccatgggtttgttcgcctgcaagatttaatacttgagcgttgtttgataaaaaactggacaatggaggttgggacaatgccaaagctattccgcctatcatttttacggtgcgggctgaaggacggaatcccagaaggactactagacctttcatcccttggcgtcgtatcactgcgtccaatggaacatgatttttcctttgaccgcacactgcatgggctgaggcagaaaggatgtgaggtcatagaacatgtc

SEQ ID NO: 120 - protein, 791 aa, Aegilops longissima
MAESVVGAVLGNVGSLAVQETRFLCGVTLEVTFLKDELMRLQGYLKDAEDKRRSGNATVAILVSQIRDVAYEAENVIEAADYMKKRNLIKKGFMGAISRYARLPSDLTTLYKVGVEIHRVRRKLREVFQSIERLKINLDSQVVDESLEDCGLVHQHFNDDVVMVGFEKEYKEMVDKLVQGANMLSLVSIVAMGGAGKTTLARKVYTSSKVKQQFDALVWVTVSQKFKVIDLLKEIVKQIPNDGDQTENIDDMNEYEVGKKIRDTLMEKRYLVVLDDVWETDTWEQINRTIKAFPDATNRSRVLLTTRKEDVANHIEMPTHVHALKCLDEEKSWVLFSSKSLPSYKRSGIREMHKFEKIGRKLARKCDGLPLALAILGGYLSKNLSTEAWSDVLISWPSTKDTKTMRGIIARSYKDLTNHCLRSCLLYLAAFPEDSIISVSDLMNLWIAECFIIPHTPKHTLEETARKYVTELAQRSLVQVVQTSSIHGWIEEIRIHDILRDWCIEEARQDGFLDVIDETSRGQVGAPSPHILISYRSSLQNPSDQNLWPSHNLRTLLGFGLSLVPLPELRFLRVLHVENSSLEDFCEVIGECIHLRYLRLKRCKDVMIHPSIGKLFNLQTLDLSWTYISQSIVSSSLWDIPTLRYVDIRKISLPRSVQTQKNLRELHMFAADDETEKDPMPILETLPCLEVLELDGYQPETMSFGAHGFVRLQDLILERCLIKNWTMEVGTMPKLFRLSFLRCGLKDGIPEGLLDLSSLGVVSLRPMEHDFSFDRTLHGLRQKGCEVIEHV

SEQ ID NO: 121 - DNA, 2322 bp, Aegilops longissima
  CDS (1)..(2322)
atggaatcggcgattggcgccgcaaccgggctcgtcggcagcgtggtgaatctgctgtccaacgagctcgtgggggcgtacgtcgccagcaccgaactcggcctcaactccgtcgagatcaagaaagatctcctgcacgcgcaggcgctgctgcaagaggcccagacgaggggcgccaaggacaaccacggcctgaaggggctgctgcaggagctcaccgtcaaggccgacgaggctgaggatgcgctggatgagctccactacttcatcattcaggaccagcttgacggcacccgctacgcggtgccggacctcggcgatgaccttcgcggtcatgctcgccacggtcgccatgctattcgccatgtcgtcggtaactgtcttgcatgcttttcttgttcgtcgactatgaaagatgatgatagtggtggtgctgctgctattcctattaacccactcaatgcaaccaagactgatagtgctggtcaagatggtccagttgataagctgaaattcgatagagtggccatgtccaagaaaattaagtcagtgatggaggaactacactccctgtgtgaggccgtatccaatttgctcggcataactccacaccagggtagcactgaaactgctgtcaacctaaatcgtcctccaacgggatcaatcagtgcgcagcatacattgtatggcagggcagacattttcaagggaaccaaagatgatataaccagtggcagattctataccgaaaccctttcagttcttcctatagttggtccaggtggtattggaaagacaactttcgcccaacacatgtataatgataaaaggatacaagagcactttgctgttagggtctgggtatgtgtatcgactgattttgatgtgcttaagctcagccaacagatccttagctgcatacaaggaagcaactctccaaatcaaacaacaagtttagaccagctccaaatatccatcacagagaaaatcatgtcgaaaaggtttctaattgtgtttgatgatatatggaaatgcagtaatcagggctgggaagacctgctagctcctttgaggaaaggggaaaccaagggtaacatggttctcgtcacaactcgatttccatccatagctgaaatggtgaaaacaacaccttcaataccactgaaaggcctcgagtctgatgaattcttcacattcttcgaagcattcatatttgatgaaaaaaaacctgagtaccaaggtgacctagcaagtattgcacgggccattgctaagaaattgaagggttcacctctagcaggcaaaaccgttggtcgattattgaggaaggagatttctcggaaacactggatggaagttctcgaaaacaacaaatggcaaaaccaagaaaatgatgatggcattatgacatctctcaggattagctatgattaccttccttctcatctgaaaaaatgtttccaatattttgccttattccctgaagattacaagtttaaaaatttagagattacatatttctggattgcaataggaatcatagaaaaaaatgaggattacatggaacaactagtggaaaatggttttgttgtgaaggagaatgttcattggtcaagccaacagtactatgtattgcatgatttactacatgaactgtcccgaagtgtttcctcacaagaatgcctcaatatatatgatagtaaaaggtttaaagctgatgccattccaaaatctattcgtcatttgtccattaccattgaagacaactatgatgtgacttttactgaagaaatgattaagttgaagagcaaggtagacattgcaaatttgagggctttgatgatttttagaagatatggagaaacaattgatgagattttaaatgatactttcaaggatgtagagggtcttcgtgtcctatttatagttgtgaagtccccaaatttgttcccatgtgatttctcaaaacttatccacctccgatacctaaaagttggaacatgggacaaagtgactttgcctagcacactgtccagactttatcacctaaaactattggacctgagtggttggcatggtagttatgagttgcctagagacactagccgccttatcagtttatgccattttattgctggaaaaaaattccattgcaatattgctgacgttggaaagatgaagtgtttaaagcagcttaaagaattccatgtcatgaaagagagtgttggatatgaactgtgtgagttggggcagttaacagatcttggaggagaactatgtatacgtaatcttgaaaaggtgacaaccaaggatgaggctacg

SEQ ID NO: 122 - protein, 774 aa, Aegilops longissima
MESAIGAATGLVGSVVNLLSNELVGAYVASTELGLNSVEIKKDLLHAQALLQEAQTRGAKDNHGLKGLLQELTVKADEAEDALDELHYFIIQDQLDGTRYAVPDLGDDLRGHARHGRHAIRHVVGNCLACFSCSSTMKDDDSGGAAAIPINPLNATKTDSAGQDGPVDKLKFDRVAMSKKIKSVMEELHSLCEAVSNLLGITPHQGSTETAVNLNRPPTGSISAQHTLYGRADIFKGTKDDITSGRFYTETLSVLPIVGPGGIGKTTFAQHMYNDKRIQEHFAVRVWVCVSTDFDVLKLSQQILSCIQGSNSPNQTTSLDQLQISITEKIMSKRFLIVFDDIWKCSNQGWEDLLAPLRKGETKGNMVLVTTRFPSIAEMVKTTPSIPLKGLESDEFFTFFEAFIFDEKKPEYQGDLASIARAIAKKLKGSPLAGKTVGRLLRKEISRKHWMEVLENNKWQNQENDDGIMTSLRISYDYLPSHLKKCFQYFALFPEDYKFKNLEITYFWIAIGIIEKNEDYMEQLVENGFVVKENVHWSSQQYYVLHDLLHELSRSVSSQECLNIYDSKRFKADAIPKSIRHLSITIEDNYDVTFTEEMIKLKSKVDIANLRALMIFRRYGETIDEILNDTFKDVEGLRVLFIVVKSPNLFPCDFSKLIHLRYLKVGTWDKVTLPSTLSRLYHLKLLDLSGWHGSYELPRDTSRLISLCHFIAGKKFHCNIADVGKMKCLKQLKEFHVMKESVGYELCELGQLTDLGGELCIRNLEKVTTKDEAT

SEQ ID NO: 123 - DNA, 2796 bp, Aegilops longissima
  CDS (1)..(2796)
atggaggccgccatgatccccttgatcaagaagctcggcggcctactcgcggatgagtacaacctggagacacgtgtgaggaaaggcgtcgagtctctgataatagagttggagatgatgcacgccgttctgcgcaagattggtgacaagccgccggagcagttcgacgagcaggtcctcatctgggcgggcaaagtgagggacctctcctaccgcatggaggatgccgtcgacagtttcgtcgtgcgcgtggaggacgacggccatgaccgtggctccaccaacatgaagaacagagtcaagaagttcctcaaaagggccaccaaactgtttaccaagggtaaggctcttcatcagatctccgatgacattgaagaagctcagcggctcgccaaggagttgggtgacctgcgccaaaggtatatgattgacgcgcacgccagcgctaatggtgatgccattgaccctcgtctgaaggcggtgtacaaagatgtcacagaacttgttgggatagatcacatcagagatgggctgattgaaaatctgtgtggttgtgatgagagatccaaggaccaattaaggaccatgtctattgttggatttggcggactgggcaaaacaactctggccaaagcagtgtatgacaagatcaaagtgcagtttcacagtcgagcttttgtttccgtttctcggaatcctgacatgaccaagatattcaagaagatcttatatgaacttgacaagagcaagtatgcaaccatcaacgaagctgctagggactatgaacaactcctcgcagaattgagaatgtttcttcaggataagaggtatcttattgtaattgacgacatatgggatgaagaagcatgggaatttatcaagtgtgctttctccgacaattgtcttggtagtcgagtaatgactacgacccgcataggcagtatctctaaagcatgttgttcttctggtgatgatataatatatcatatgaaacgtcttactgatgatgactccagaaaactcttctacaaaagaatatttcctcaaggaagtaagtgccctgctgaattggagccagtatctagagaaatcttaaagaaatgtggtggagtaccactagccatcattactattgctagtattttagctaataatggtcaggatcaacggataaagccaaagtatcactgggacaacatacttggctctattggtcgtggactcgcagaaggtggtagtgcaaacgatatgcatagaatattgtcctttagttattatgatttaccttctcatctgaaggcttgtttgctatatctcagtatatttccagaggattttgagataaggagaaaacgactcatatggatgtggatagccgaaggctttgtgcaagatggaaaaaaacaaactggactatttgagcttggagagagttacttcaatgaactcgcaaatagaaacttgattcaaccaatacatgttgatgatacaggcaaggcgaaagcttgtcgcgtccatgatatgcttctcgatctcctatgttccctgtccagtgaagtaaactttgttactatattagatggtactcagcaaagcaaacatatctcacacaacaagagtcgcagattatcttttcaaaatagcatgtcagagctcaccacccatggggtcgatgcaacaagtatgtcacgagtgaggtctgttgttctctttagaactgatactgatctgatccgcactgtttcaggctttcatgttttacgtgtattggatttagaaggttgtgatcttcgaaaaaatcgccaacatattgatctcaggtatgttgagaatttattacacctaagatatctggggctgagagaaacttttgttggtgagctccctgtggaaatagggaagctaaagtatttggagacactcgacttagcacaaaatgggtcaagtgtagcaacgattccgtcaagtgttgtctgtctaagacgtttgatgttcctagatgcaggcgatgcggtattacccgttgggatcgggaacctgacgtccttagaggagttgactggaaaattggtggatatgaaagagctagggcaattggtcaagctgagagtgctatacctttactggaatggggacgatgagagcatgtgtaattctttgcagctgtccttgggcaagctgcagaaaatgcagagtctaacaattttcaatgtaggggatgcaaggtctgatgtcagctgggatggttgggtgcccaccccacagcttcggtatctcttgtttagatgttgcaccaccacattgcctaggtgggttaattcatcatcgtttcccctcctctcctccatgagtatttcagtggacagagtccggccagaagttgacattcaaatcctcgggacgcttcccgctctttgtcttctctggctgttgaccagcaaacatcagcacacttttgtcaaaacatttgtcgttggcgctaatgcattcccgtgtttgagagagtgcagcttctttggttttctcacggggccatcaatgtttccacgaggagctatgccaaggcttgaattccttatgttctcagcccgagcgtcggatattgtcggcggtgacctggatgtcagcatggggcatctcccattcctccggcatgtcatggtttacctgtggcttgaggaaggcagctctttagataagtgtaaggaggaagcggatgttgtactgaggcatgcactggacatccatcccaaccgtcccacccttgagacctacaaggatgctttttataaccaa

SEQ ID NO: 124 - protein, 932 aa, Aegilops longissima
MEAAMIPLIKKLGGLLADEYNLETRVRKGVESLIIELEMMHAVLRKIGDKPPEQFDEQVLIWAGKVRDLSYRMEDAVDSFVVRVEDDGHDRGSTNMKNRVKKFLKRATKLFTKGKALHQISDDIEEAQRLAKELGDLRQRYMIDAHASANGDAIDPRLKAVYKDVTELVGIDHIRDGLIENLCGCDERSKDQLRTMSIVGFGGLGKTTLAKAVYDKIKVQFHSRAFVSVSRNPDMTKIFKKILYELDKSKYATINEAARDYEQLLAELRMFLQDKRYLIVIDDIWDEEAWEFIKCAFSDNCLGSRVMTTTRIGSISKACCSSGDDIIYHMKRLTDDDSRKLFYKRIFPQGSKCPAELEPVSREILKKCGGVPLAIITIASILANNGQDQRIKPKYHWDNILGSIGRGLAEGGSANDMHRILSFSYYDLPSHLKACLLYLSIFPEDFEIRRKRLIWMWIAEGFVQDGKKQTGLFELGESYFNELANRNLIQPIHVDDTGKAKACRVHDMLLDLLCSLSSEVNFVTILDGTQQSKHISHNKSRRLSFQNSMSELTTHGVDATSMSRVRSVVLFRTDTDLIRTVSGFHVLRVLDLEGCDLRKNRQHIDLRYVENLLHLRYLGLRETFVGELPVEIGKLKYLETLDLAQNGSSVATIPSSVVCLRRLMFLDAGDAVLPVGIGNLTSLEELTGKLVDMKELGQLVKLRVLYLYWNGDDESMCNSLQLSLGKLQKMQSLTIFNVGDARSDVSWDGWVPTPQLRYLLFRCCTTTLPRWVNSSSFPLLSSMSISVDRVRPEVDIQILGTLPALCLLWLLTSKHQHTFVKTFVVGANAFPCLRECSFFGFLTGPSMFPRGAMPRLEFLMFSARASDIVGGDLDVSMGHLPFLRHVMVYLWLEEGSSLDKCKEEADVVLRHALDIHPNRPTLETYKDAFYNQ

SEQ ID NO: 125 - DNA, 2700 bp, Aegilops longissima
  CDS (1)..(2700)
atggccgaggctgtacttattgctgtgacgaagattggttccattttaggagatgaagtcatcaaggccatcatatccgagctctctgtaaaagttactaatctgaaagaactgccggtaaagattgagcaaataagacagcaactgaatatgatgagtaatgtaataatgcagatagatactgtatacctgatggacaaaggggtcaaggattggattggggaagtccgcaacgtggcctaccatgttgaagacgtaatggataaatactcataccatgtacttaaacataaggaacaaagtctcctgaagaaattattgaaaggaaaagattatgcagttttcagtcaaattgcggatgaagtagttgtggtagaggaggagattaagcaagttataaagttgaaagaacagtggttgcaacccttccagcttgtccctgacccacttactgagatggaaagacggtggtcccaggacagcttccctgaatttgtcaaagatcaagatctagtaggaattgaagaaaacaggatgttgctgaccggatggctccactctgaagagacggagaacaatgtgataacagtatcaggcatgggcgggttgggaaaatctaccttggtttcaaatgtttatgaacgtgaaaagatcaagttcactgcacatgcatggatcgttgtgtcacaaatttacactgttgatgctctgttgaggaagatactatggaagattggatacaccgaaaaaccattgtcagcaggcatggacaaaatggacatatatgacttgaaaaaggaaatagagaagatgcttgaaaatagaacatatctgattgtacttgatgatgtctgggagcaggaggtatacttcaaaatatgtgatactttccagaatctccaaggaagccgcataatcattacgacacggaaggaccatgttgcaggaatttcttctcccacccgtcacctcgagctcctgccattgagtaatcctgatgcatttaagctcttctgtagaagggcttttcacaacaggaaggaccacacatgccccaaggatcttgagacaattgctgcttctattgttgaaaagtgccatggcctgcctctagcaattgttaccattgggagcatgttgtcttcaagacaaaatttagatgtttataagaaaaagtacaatcagcttggacacgagttgtcaaacaatgatcatgtccgagcaattttaaatctgagctaccatgacctttcagacgagctcagaaactgcttcttgtactgcagtctcttccctgaagactaccacatgtcacatgacagccttgtgaggctgtgggttgcggaaggctttgtgcagagtaagggaaagaacacggcagagatggtagctgagggaaatctcatggagctggtccaccgcaatatgcttgaggtggtggagtatgatgagcttggcagggtcagcatctgtaagatgcatgatattatgcgtgaactagctagttctgttgctaaagaagagagatttgcttcaacagatgatcacaacacaatgatggatattcgtcgtctgtcatcatgtgaatggaaagaggacactgcactgaaagctaaactttcacatcttcgaacagtagtgtcagtaattccatcctcgcctgacatgctatcatcaattttatctgcatcgaactaccttactgtccttgagctgcaagactctgaaataactgaagtgccaaaatcgattgggtctcagttcaatctgcgttacatcgggttacggcgcaccaaggtcaaggcacttccggactctattgagcatttgtctcgcctccacaccctcgacatcaagcaaaccaaaatagagaagctaccacgagggcttttcaagatcaagaagctgcaacatcttttcgccgatagatatgtcgatgagaagcaggtggagtttcggtactttaatggaatgcaagcacctaaagagctgtccaacttggaagaactgcaaactcttgagaccgtggaatccagcaatgacttggccgagcagctgaagaaactgatgcaactaagaagtttgtggattgataacattagtgccgctgagtgtgcaaatctgtttgctaccctttcaaatatgccgcttctttcaagcttgcttctttgtgcaagggatgagaatgaggcactttgctttgaggctctccaaccaaggtctacagatctacacaagttgattatcagagggaaatgggccaaggggacactaaattgcccgatatttctcaagcatgggacacatctcaagtatctagcactaagcgggtgtcaccttgtggaagatccacttgagatgctcgcccggcacatgccaagcctcacgtatctgagacttaacaacatgcatggtgcaagcactctggctctttctgcaaattcctttccaaacctgaagacatttgtcttaaggtgcatgcatgatgtcagtgagctaaacatcactgagggcgctcttccatgcgttgaaggtctgtatatcatctcgctgccgaagcttgacagggtccctcaaggcattgaatcccttcgctcccttaagaagctcacactgcagtgcttgcacaaggatttcagaagtcaatgggacactaacggaatgcatcagaagacactgcatgttccagaggtttgtgtt

SEQ ID NO: 126 - protein, 900 aa, Aegilops longissima
MAEAVLIAVTKIGSILGDEVIKAIISELSVKVTNLKELPVKIEQIRQQLNMMSNVIMQIDTVYLMDKGVKDWIGEVRNVAYHVEDVMDKYSYHVLKHKEQSLLKKLLKGKDYAVFSQIADEVVVVEEEIKQVIKLKEQWLQPFQLVPDPLTEMERRWSQDSFPEFVKDQDLVGIEENRMLLTGWLHSEETENNVITVSGMGGLGKSTLVSNVYEREKIKFTAHAWIVVSQIYTVDALLRKILWKIGYTEKPLSAGMDKMDIYDLKKEIEKMLENRTYLIVLDDVWEQEVYFKICDTFQNLQGSRIIITTRKDHVAGISSPTRHLELLPLSNPDAFKLFCRRAFHNRKDHTCPKDLETIAASIVEKCHGLPLAIVTIGSMLSSRQNLDVYKKKYNQLGHELSNNDHVRAILNLSYHDLSDELRNCFLYCSLFPEDYHMSHDSLVRLWVAEGFVQSKGKNTAEMVAEGNLMELVHRNMLEVVEYDELGRVSICKMHDIMRELASSVAKEERFASTDDHNTMMDIRRLSSCEWKEDTALKAKLSHLRTVVSVIPSSPDMLSSILSASNYLTVLELQDSEITEVPKSIGSQFNLRYIGLRRTKVKALPDSIEHLSRLHTLDIKQTKIEKLPRGLFKIKKLQHLFADRYVDEKQVEFRYFNGMQAPKELSNLEELQTLETVESSNDLAEQLKKLMQLRSLWIDNISAAECANLFATLSNMPLLSSLLLCARDENEALCFEALQPRSTDLHKLIIRGKWAKGTLNCPIFLKHGTHLKYLALSGCHLVEDPLEMLARHMPSLTYLRLNNMHGASTLALSANSFPNLKTFVLRCMHDVSELNITEGALPCVEGLYIISLPKLDRVPQGIESLRSLKKLTLQCLHKDFRSQWDTNGMHQKTLHVPEVCV

SEQ ID NO: 127 - DNA, 1551 bp, Aegilops longissima
  CDS (1)..(1551)
atgagaaagatattggcccttagctatcaccatctacctatccatctaaaaacttgcttgctgtatctgagtatatttcctgaagactacattattcaaggagacagattgatatggaggtggatatgtgaaggttttcttaatggtgtacaggatgaggacttatttgagcttggtgagagctacctcacggagctcataaacagaggattgatccaagcggtggattcctatagttatggcatgacaacggcttgccgtgtgcatgacttggttctggaatttatcagctccatttctgttgaagaaaacttttgtactgtatttcatgataagaaggccaaatcagctgcgataacaagcaaggtccgcaggttatttctgcaactccaggatgttgagatgcctcaggggagattgatattgtctcacatgaggtcacttactgtgtcgggccactgggttgacaaaatgtcgcccctttctgtttcccctcaattacgtgtattggatttggaggagtgctatcttctcgagcaacgcgataaattacttgagcatcttgggagtttatgccagttgagatatctttcgttgggaaatacataccccagtgacctcttattggcgatccaaattgggcagctaaaaaatctgatatgcttaagagttgagggtcccttaaaaatcaaattggggccaggtgtggttagggaactggagtgtctgcaagtgttgtcaatgatcagtttgtctaagtctccgcatgttgcgaaagagctaaggcatttgactaaactgagggttctttgtatctctttcgaagatatgcctgatgagagcttgaagggttggcttttggagtctctatgtcacctggagaatttgcagagtttaactgtgagcccgagttataatcctggtgatgtggaatccttggatttcttaggggcaggctggacaccccctcctcggaacctccgtaggttcacggcatggggcaccttctcgtatctgccgtcgtggatcagcccgtcaaatctccgggagctgtccttcataaacatcaggctgggccacctgcggcaggaggatcttgacatacttggttcctttccagttcttcaatccctcaggctgagttactacaataatatatgggatgaaaaaagggaacagtggccagtgatcggggctggtagttttcagtgcctgcgggagtgtgtgttggggaaaattcccacgggatggaatatgttcgcaccaggagatatgcccaaggtacataggcttcaatttgattgttacgttgacgatgtagatttggcaaacctcccatctctccatgatagcttgggcttggagaacctcccttctctccaggagctccatgtttgcttcagagaattcacccatgggtccatcacccgagaagcatatgacaaagcggaggctgcaattaggtgtgcagcagacaaccatcccaaccgccccacccttcacttagccaagttgttctgtccatcatggtgtagcaactgggactccgca

SEQ ID NO: 128 - protein, 517 aa, Aegilops longissima
MRKILALSYHHLPIHLKTCLLYLSIFPEDYIIQGDRLIWRWICEGFLNGVQDEDLFELGESYLTELINRGLIQAVDSYSYGMTTACRVHDLVLEFISSISVEENFCTVFHDKKAKSAAITSKVRRLFLQLQDVEMPQGRLILSHMRSLTVSGHWVDKMSPLSVSPQLRVLDLEECYLLEQRDKLLEHLGSLCQLRYLSLGNTYPSDLLLAIQIGQLKNLICLRVEGPLKIKLGPGVVRELECLQVLSMISLSKSPHVAKELRHLTKLRVLCISFEDMPDESLKGWLLESLCHLENLQSLTVSPSYNPGDVESLDFLGAGWTPPPRNLRRFTAWGTFSYLPSWISPSNLRELSFINIRLGHLRQEDLDILGSFPVLQSLRLSYYNNIWDEKREQWPVIGAGSFQCLRECVLGKIPTGWNMFAPGDMPKVHRLQFDCYVDDVDLANLPSLHDSLGLENLPSLQELHVCFREFTHGSITREAYDKAEAAIRCAADNHPNRPTLHLAKLFCPSWCSNWDSA

SEQ ID NO: 129 - DNA, 3285 bp, Aegilops longissima
  CDS (1)..(3285)
atggcggtggtgctggactcgtacgtgaagcggtgcgcggcggcgctggaggagttcgccgggcaggaggcctgcggcgcgctcggcatccgggacaacgtgcggggcctgctgggcacgctggcgcgcatcgacgccgtcgtctcccacgaggagcgccgccgggtgctcagctcccgggtggacgcctgggtggtgctgctcaaggacgtcatgtacgaggtggacgacgtgctcgacgtctgcgccgccgagggcgccaagatcctcgccgacgaccacccgcccgcgcccaaggtgcgctgcgccttcatgttctcctgcttccgctactcgggcccccagaagttccaccacgagatcggcttcaccatccgggacatcgacatccggctcagggagatcgaggacgagatgccgccgctccccgccgccgccgccgggccgtccccgcgacgccccggcgccgccaggagggattggttcagcagcgaaatgtccaggagctgccacgacgacgtggtgaagcctcgcgccgcggtggggacgcaggtccagaagtccgtcgccggcctcgtgccgaggttgctcagggagggcaagaagaaggtggacgtcttcgccgtcgtcggcgccgtggggatcggcaagaccacgcttgccagggagatattcaccgacgagaggatgaccgaaaacttccccatctgcgtgtgggtgaagatgtcgaaggatctgtccgaggcagctttcttgaagaagatcatcgccggcgccggtgtaaatgctggggacacagagaacatggaggagctccttgccctcctcagctctgctctttcaaagaggtttctcatcgttttggatgacctggacagcccgggcatatgggacgatctgctgaaagatccactgggagacggcgtggcaaggggcagaatactggtcacgacacgggacgaggaggtggcgacaggcttgaaggcagtcgtccaccgcgtcgacaaaatggacgcagagaacagctgggcgttgctgtgcgagcaggtcttcctggaatgcgattcagaggaggtccaagcgctggaggatgtcgggatgaagatcgcggagaaatgcgagggccatcctctggcaatcaaggtcatcgcaggtgtcctgaggtcgagaggcacgagcaaggacgagtgggagatggtcctgaaaagcgacgcttggtcgatgcggccgttgcttcagcaggtgccacaggctctctacttgagctatgttgatctgccttctgaactcaaggagtgcttcctccactgctctttgtatccagaagactgccccgttcggcgctttgatctcgtgcggcactggattgccgaaggccttgtcaagcccagagagaacaaggaactggaagagtctgctgaagagtactatctggagttgataggcagaaacttgttacagcctgatcctgacaatcttgaccagtgctggatgacacatgatctgctacgctctctggcccgctttctgataacagatgagagcatcttaattgacggccaggagagctcgagcatgggctcgttgtcctcactgtcaaagcctcggcatcttgcattgtgtaacatggagaacagcttggaggatccgatttcagtgaagcagcagatgagcctaaggtcactgttccttttcaacagcccgaatgtcagagtgatagacaatcttcttctcgagtcagccacgtgcttgcgtgtcttggacctgagcaatacaggaatagaggctctcccaaaatcggtcggcaccttgcgacatctgaggtacctcaatcttgacgggactcaggtcagcgacctaccctcctccgtcggctatctcgtaaatttgcagaccctgagccttgaaggctgtcaaagattacataaactcccttggtccatcagtgaactgcaagagcttagaagcctttgcctcgagggaacttccctacgctatgtaccaaaaggtgtgggtgagctgaagcatcttaaccatctatctggtctgatcattggtcaggacaacaatgatcctgagggctgtgacttgattcaccttagagccatgtctgaattgaggtaccttcagatagagagacttgatagggctacttctggagcttctgcactcgcaaacaagccattcctgaaggttctgcacctgtctgagcaagcaccattaattgaagaagaagagaatggggaagaacaggagaaccaagagggcgcagagaaagaagagaaggacggacacgaagtaaaaaatgctcagtggattagagacgattcagctaaagtgagtgaaaagatatggaatgagctcaccccacccaatagcgttgagaagctggtaatcaagaactaccaaggtcgaaagtttccaaactggatggcgggtcccaagctaagcacctccttccctgcccttgccttccttgatcttgacaactgcatgtcatgcaccactctgcctgctcttggccgcctgaaacagctcaggtccctggaaatctcaaatgcagactccattgtcgccatcggttctgaattcctcggcaccactgtgatgtcacgagccatctcattccccaagcttgaggttttgaagctaagaaacatgaagaatctggaagactggtccttgagtgtggaagagagccagacattgctgccttgtcttaagtcactgcacatacagttctgccctaaactcaaagctctgccagaaggtctaaaggacgctgctctgtgcgaccttcgtgtcgagggtgcacattgccttacagagataaaggacctgccaaaactatctgatgaactccatctgaaagataacagggcgcttctgaggatctccaacctacccgcactcaagtcactcaccatcgacgactgcgcgaagctgaagcacgtctcgggcctcgacacgctgcagcatctcaggcttgagttccccccatccacggagacatactatttcgaggagttggtcaccttctggaacatcgcgttcccacggtggctggagctgctgatccgtttgcaggccaatggcctgcgtcgattcgagctgcagtgtgcactccctttactcaggagctgcctggagggtgggaagaattggcacattgtgcagcagatccctgaggtgcgcatcacaagcaccgatggcaagaagtacataaggtacaacaaggcccgccgcatctacgagacgaatgctcagtgtgaagagaagtctacc

SEQ ID NO: 130 - protein, 1095 aa, Aegilops longissima
MAVVLDSYVKRCAAALEEFAGQEACGALGIRDNVRGLLGTLARIDAVVSHEERRRVLSSRVDAWVVLLKDVMYEVDDVLDVCAAEGAKILADDHPPAPKVRCAFMFSCFRYSGPQKFHHEIGFTIRDIDIRLREIEDEMPPLPAAAAGPSPRRPGAARRDWFSSEMSRSCHDDVVKPRAAVGTQVQKSVAGLVPRLLREGKKKVDVFAVVGAVGIGKTTLAREIFTDERMTENFPICVWVKMSKDLSEAAFLKKIIAGAGVNAGDTENMEELLALLSSALSKRFLIVLDDLDSPGIWDDLLKDPLGDGVARGRILVTTRDEEVATGLKAVVHRVDKMDAENSWALLCEQVFLECDSEEVQALEDVGMKIAEKCEGHPLAIKVIAGVLRSRGTSKDEWEMVLKSDAWSMRPLLQQVPQALYLSYVDLPSELKECFLHCSLYPEDCPVRRFDLVRHWIAEGLVKPRENKELEESAEEYYLELIGRNLLQPDPDNLDQCWMTHDLLRSLARFLITDESILIDGQESSSMGSLSSLSKPRHLALCNMENSLEDPISVKQQMSLRSLFLFNSPNVRVIDNLLLESATCLRVLDLSNTGIEALPKSVGTLRHLRYLNLDGTQVSDLPSSVGYLVNLQTLSLEGCQRLHKLPWSISELQELRSLCLEGTSLRYVPKGVGELKHLNHLSGLIIGQDNNDPEGCDLIHLRAMSELRYLQIERLDRATSGASALANKPFLKVLHLSEQAPLIEEEENGEEQENQEGAEKEEKDGHEVKNAQWIRDDSAKVSEKIWNELTPPNSVEKLVIKNYQGRKFPNWMAGPKLSTSFPALAFLDLDNCMSCTTLPALGRLKQLRSLEISNADSIVAIGSEFLGTTVMSRAISFPKLEVLKLRNMKNLEDWSLSVEESQTLLPCLKSLHIQFCPKLKALPEGLKDAALCDLRVEGAHCLTEIKDLPKLSDELHLKDNRALLRISNLPALKSLTIDDCAKLKHVSGLDTLQHLRLEFPPSTETYYFEELVTFWNIAFPRWLELLIRLQANGLRRFELQCALPLLRSCLEGGKNWHIVQQIPEVRITSTDGKKYIRYNKARRIYETNAQCEEKST

SEQ ID NO: 131 - DNA, 2892 bp, Aegilops longissima
  CDS (1)..(2892)
atggcgggggtcagcgcggggacgggggcgatgagctccctcctcggcaagctctccgccttgctcaccgaggagtacaagcttctcaagggcgtccgcaaggagatccagttcctggagcgcgagcttggcaggatgcgagcctatctggacatactggcggacatggacaagctcgacgacctggccaagaagcggagagacaacttgcgcgacctcagctacgagatggaggactgcatcgaccgtttcatggaccggcttggcaccggcgacgccaggcgagggttcatgagggcgaccgcgcgccggctcaggacgatttgggcgcgccatggcatcgcgaccctcatcagggacctcaaagctcgggtcatgcaggagaccgagctgcatgacaggtacaagcttgatgagggttattacagtgcaacaaggccagttgaagtagatccccggatgactgcgtttcacgaggaggtcaagggcttggtggccatggacgccccagtgaagcacatttctgcattgctgatggatcagagtatggagctgaaagtggtgccgattgtcgggcctggaggcttggggaagtcgacccttgcaatggaggtctatcgcaggattgggagagacttccgttgccgagcttccgtatcagtgtcacgcgctcttcatctggagaagttcctcaaggatatcttgtctcaaattgatgagtctagagaatgtcagccagagggttcagacatacagcaacttatccgtaaaaccacacaaatcttgaccggaaagaggtacttcattgttattgatgacatatggaaagaacacgattggaaattggtcaaggcaacatttcccgagaataataatggtagcagaataattgctactacacgcatcactggtgtagctaatttgtgctgttccagatccgggggtctaccctaccaaatggcacctctagatgatgttggttctcgaagattgttctttaagagaattttcagctcagatgatccctgtcccgcagaactggaagaagtttctactaggatcttaaaaaagtgcggtggtctgccattggctataattacatttgcaagtttgcttgccaacaagacacgtaacaacgatgaatgggagagactgcaagataccattggtactggttcttcgtttgataacaatgagaccttcaaagggatgagacaaatattgttacttagttatttggatcttccacgccacctgaagacttgtttattgtacttgtgtatatatccagaggactatgaaattgaatgtgaagaattgaaatggaaatggatggcggaaggattcattgctacacaatggggacgtttggatcaagtagcagagaattgtttgaatgaacttgttaataggaatatgattcagccagttgatgttgggtatgatggttctgtgaaacgttgtcgggtccatgatatggtgcttgatctcgtcatatctttagctgatgaagagaactttgctaccgttttaaatggacgtatttgcaattcattttcaagcaagattcgtcgtctgtcaatgcactctagtgccaaagagcatgatgaggcggtccatgcaatcacagaaaccaaattacatgttcgctcaatgactatgtttgggcaagttaagcagatatgccacctcgtggactttcatgctttgcgggtgttggatctcgtaggatgtgaatggttggaaaacaagcatgtaaaaaatataggaagttcatgtcagcttaggtatttgcgatttagcagttttaaaattacagagcttcctgtggaaatcggaaagctgcagcacttagagactcttgatgtgagaggatgttattatcttccaagactgccatcaactgtggtgcagttgaaaaaattggtgcgcctacttgtcagccgtcgaacagagttgcctgcaagtgagtttgggagtatgcaagccttggaggagttggagaagttaaatatctggaacagtgacaacccactgagatttgcggaagagcttggacatctaacaaaattgagaagagtggatatacatctcaatctcaatctcaatgaaaaacttatcatggattatgcaacaagagaaagattggtggaacttttggtgtcatctttaagtgagttgggtaaatgcaaccttcgatatcttagcattggtggagaccagtgtaatcgtctattctgggacccatgctgcacctatccatacctccacgatcttacaattgggccagctattaaaacagttaccaagggaatggcctccctcaaaaatcttgtgaaactatgcatagcggtcgaggaatttgataaggagggtctctatctccttatgggcatgccttttctagcccatcttgagctagcgatacgaatatcgatcaaagaaaagctgaacatcggtactaatggattcaagctactaaaggtgttccacttcacatacatgacagccaggtggtattccaaagtgaaggcaatagatggactgcagctaacattcgcaacaggtgccatgccagcactccgacagttccatcttgaactgaacccaatggaggtgacatccaatttttttgcagacttgggtattgagcattttccaggccttgcacacttccaggtcgaaattgattgtaacggagcagctccaggctgggtggaggctctagagtcttccattgaaaaagcaactgacttgcaccctaacaacgaaatggaaatccatctccgcagactccatgaagatggcatgtttaaggatgacaaggagtgggaagaggctgctgcaaaagaaagaaagaaagaaagaaatgaagaggaaggaagaacttcg

SEQ ID NO: 132 - protein, 964 aa, Aegilops longissima
MAGVSAGTGAMSSLLGKLSALLTEEYKLLKGVRKEIQFLERELGRMRAYLDILADMDKLDDLAKKRRDNLRDLSYEMEDCIDRFMDRLGTGDARRGFMRATARRLRTIWARHGIATLIRDLKARVMQETELHDRYKLDEGYYSATRPVEVDPRMTAFHEEVKGLVAMDAPVKHISALLMDQSMELKVVPIVGPGGLGKSTLAMEVYRRIGRDFRCRASVSVSRALHLEKFLKDILSQIDESRECQPEGSDIQQLIRKTTQILTGKRYFIVIDDIWKEHDWKLVKATFPENNNGSRIIATTRITGVANLCCSRSGGLPYQMAPLDDVGSRRLFFKRIFSSDDPCPAELEEVSTRILKKCGGLPLAIITFASLLANKTRNNDEWERLQDTIGTGSSFDNNETFKGMRQILLLSYLDLPRHLKTCLLYLCIYPEDYEIECEELKWKWMAEGFIATQWGRLDQVAENCLNELVNRNMIQPVDVGYDGSVKRCRVHDMVLDLVISLADEENFATVLNGRICNSFSSKIRRLSMHSSAKEHDEAVHAITETKLHVRSMTMFGQVKQICHLVDFHALRVLDLVGCEWLENKHVKNIGSSCQLRYLRFSSFKITELPVEIGKLQHLETLDVRGCYYLPRLPSTVVQLKKLVRLLVSRRTELPASEFGSMQALEELEKLNIWNSDNPLRFAEELGHLTKLRRVDIHLNLNLNEKLIMDYATRERLVELLVSSLSELGKCNLRYLSIGGDQCNRLFWDPCCTYPYLHDLTIGPAIKTVTKGMASLKNLVKLCIAVEEFDKEGLYLLMGMPFLAHLELAIRISIKEKLNIGTNGFKLLKVFHFTYMTARWYSKVKAIDGLQLTFATGAMPALRQFHLELNPMEVTSNFFADLGIEHFPGLAHFQVEIDCNGAAPGWVEALESSIEKATDLHPNNEMEIHLRRLHEDGMFKDDKEWEEAAAKERKKERNEEEGRTS

SEQ ID NO: 133 - DNA, 2799 bp, Aegilops longissima
  CDS (1)..(2799)
atgcggcgagaagaactccttgagcgaagaaccatggagaaatttctggtgagtgcatccacgggagccatgggctccatcctgaaaaagttgggcaccatcctgagcgacgaatacaagctgctcaaaggtgtccgcgacaacatcaagttcctcaaggatgagctcgaggccatgcaagcgttcctcattgagatggcacacgtggagaaacctgacaagcaagctaagcttcgtgcagatgttgtgcgagagatgtcctatgagatcgaggacaacatcgacaagttcatggtactcatagaacatgagcccagttccgagtctgatggcttcgggaagctctttagcaaaaccatgaaaaagataaaagatatcaagacccgccataagatcgccaaggacatcaaggacatcaagattcaagtgaaagagattagtgcaagatattcaaggtacaagatcgatgagtcttctagacctagaaacaaaaaggttgacccgcgactttgcgcggtctataaagatgcatcggagcttgttggcatcgatggtccaagagaagaacttgtgacctggttgagcaaggagaagggtgcatcggcacaccagttgaaagttgtctccattgtcggatatgggggactaggaaaaacgactcttgccaaacaagtctatgacaagcttgcagcaaactatgaatgtcgggcttttgtgtcaatttcacgtagtcctgatatgctgaagatcctgagttctatattatctcaactccgtaatcagaacaatgcttgtgcaggagatgaacaacacatcatcgaccaaatcagaaacttcctccgtgataaaaggtaccttatcgtaattgatgatgtatgggatgtacaaacatggaaaacactggattgtgcactagtcaggaacggttgtggtagtgtaataattagcacaacacgcatacacaatgtagctcaatcatgttgctcatctgatgtggaccttatccatgaaattcaaccacttggtattgctgactcaaagaagttatttttcaagcgaatatttggctgtgaggagaagtgccctcataacttgaaagaagcgtcagaagatatcttgaaaaaatgtggtggtttgccattggctatcagtgccatatctagcttgttagctactgagaaaactctagaagagtgggatcaaattcgaagttctattggctttgcacaagaaacaaattcagatattgatgccatgaattacatattatctttgagctactttgaccttcccctctatctaagaagttgcctattgtacttgactatgtttcctgaagatcatgagattgaaagggatcgtttggtatacaagtggatttcagagggcctcatccatggtagagaaggagaagatcttgttaaattaggagatgaatatttccatgaacttatcaatagaagtttaacacaaccagtgggcatcgggtatgatggcaaggcattgtattgccgagtccatgataccgtccttgatttcctcatttacaaatccaatgaagagaacttctgtactttcttaagcaatcatcctaaggcagatggcaaagtccggcggttgtctccgatgggaaatgaagatcaaggaaatgtcgagcaattggatttatcacatgctagatcactctgtgcttttggtaattcccgaaaatatctgccttcccttgcgaagttaaatgctctacgtgtgctggacataggtcaatgctttgaactaggaaatcatcatgtcaaagatattggaagattatttcagctcaggtacttgaacatccatttgacaaatataaccgagattcctagagaaattggagacttggagtatctagagacgctaaatgtgaggaatacagaactactagagctacctgaatcggttactcggctaaaacgactggcacgtctgtttgtatcagttcgaactaaattgccggattgtgttggtaaaatggaaaagctgcaggagcttggcaacatagacacctccctgcaatcagtgaagtgtctggaagagctcggcaaactgaaaaatctgagaaagatgcgcattcgttgggacaccagtgaacttgacaaatcaagttgcaagggagaaaagctagtgtcctcactctgtgaattgaatgcatgcaaacttcgcaacctctatatcactgtttttctgggagaagaagatggcctcaaagggcatccatccttccctgctctcagtagcatccgaacaatttgtttatgccgtgggcaactttgctggattaccaaatggctggtttcacttcccaacctagaagaattatctgttcttggtgggacaaagatagagcagcaggatgttgagatggttggaaaaataaccactctgctccaattcagtggcaacataaggcccattgtcatcactaccgatgcagggtttcaacagttgcaggtgcttgcgctcaactgcggtgtcacagggttaacgtttcaagcaggtgccatgccaaatctcaagaagattcaaatgcagattcatctaagtcagttcatatcagaacatggtgttggtgttttggatgattttggcttccaacacctctctagtcttgctctattggatatagagatggattgccgtgactcgagagctgcaaatgtggaggctgcagaggatgctgtcaagagcatggcggaagcgcaccccaaacaccccacacttaaaatgaagagagtgtgtgaagaacagatgctacaggatgag

SEQ ID NO: 134 - protein, 933 aa, Aegilops longissima
MRREELLERRTMEKFLVSASTGAMGSILKKLGTILSDEYKLLKGVRDNIKFLKDELEAMQAFLIEMAHVEKPDKQAKLRADVVREMSYEIEDNIDKFMVLIEHEPSSESDGFGKLFSKTMKKIKDIKTRHKIAKDIKDIKIQVKEISARYSRYKIDESSRPRNKKVDPRLCAVYKDASELVGIDGPREELVTWLSKEKGASAHQLKVVSIVGYGGLGKTTLAKQVYDKLAANYECRAFVSISRSPDMLKILSSILSQLRNQNNACAGDEQHIIDQIRNFLRDKRYLIVIDDVWDVQTWKTLDCALVRNGCGSVIISTTRIHNVAQSCCSSDVDLIHEIQPLGIADSKKLFFKRIFGCEEKCPHNLKEASEDILKKCGGLPLAISAISSLLATEKTLEEWDQIRSSIGFAQETNSDIDAMNYILSLSYFDLPLYLRSCLLYLTMFPEDHEIERDRLVYKWISEGLIHGREGEDLVKLGDEYFHELINRSLTQPVGIGYDGKALYCRVHDTVLDFLIYKSNEENFCTFLSNHPKADGKVRRLSPMGNEDQGNVEQLDLSHARSLCAFGNSRKYLPSLAKLNALRVLDIGQCFELGNHHVKDIGRLFQLRYLNIHLTNITEIPREIGDLEYLETLNVRNTELLELPESVTRLKRLARLFVSVRTKLPDCVGKMEKLQELGNIDTSLQSVKCLEELGKLKNLRKMRIRWDTSELDKSSCKGEKLVSSLCELNACKLRNLYITVFLGEEDGLKGHPSFPALSSIRTICLCRGQLCWITKWLVSLPNLEELSVLGGTKIEQQDVEMVGKITTLLQFSGNIRPIVITTDAGFQQLQVLALNCGVTGLTFQAGAMPNLKKIQMQIHLSQFISEHGVGVLDDFGFQHLSSLALLDIEMDCRDSRAANVEAAEDAVKSMAEAHPKHPTLKMKRVCEEQMLQDE

SEQ ID NO: 135 - DNA, 2754 bp, Aegilops longissima
  CDS (1)..(2754)
atggaggcagctctggtgagtgcagcaacaggggccctgaaacccgtgctggagaagctggccgctctgctcggcgacaagtgccggcgtttcaaggaggtgcgcgacgagatcaaattcctcaccgacgagctcgcggccatgcacagtttcctcctcaagatgtcggaggtggaggatcctgctgttcaggacaaggcatggatgaatgaggtgcgggagctgtcctacgacatcgaggacaacctcgatgacttcgtggcgcgtgtcgacgacgacagatctgccaagccagatggcttcatggagaagatcaagtacctcttggacaggaccaaggctcgccatgggatcgccaaggccatacaaggtttgaagaaacaagtcgttgtggtggggaagagacacgcaaggtacgccactggcgaggccatctccaagcctagcaatgccatggttgatcctagagctcttgctatctttaaggatgtatccaagctcgtcggcatcggtggaccaaaggacaagattatccaactattggccaaaccaacgcagcaacaaccaagggtggtctccattgttggatttggaggtctaggcaagacaactcttgcaaaccaagtgtataaagagcttgtcgggcaatttgattgccatgctttcttatcagtgtcacgcaatccagacatgatgaaagttttgagaactattctaagccaagtgaccaggaaagattatgttaatacagaagccggggatgaacaacaacttatcactgagatctcctgtttcctccttgacaaaaggtactttgtggtggtcgatgatatatggaacatcgatgaatggaatgttatcaagtgtgcattccccatcacctctcttggcagcagaataatcaccactactcgtaataatgatgtcgctcaatcttgtagttcatcaatcaaggaaaatatttatgaaataaagcctcttaatgtgatgcattcaagacagctttttcacatcaggcttttcaactccgaagaagattgtccttcacaccttaaagaagtttctgatcaaatattggaaaaatgtggaggcttacctctggcaattatagctatatctggtttgttggctaacaccgaaagtacaaatgatcaatgggacagagtgaaaaattcaattggttgtgcactagaaagaaatcctagcattgaaggaatgataaagatattgtctcttagttactttgatcttcctcctcatcttaaaacatgtctactctacttgagtatattcccagaagatcaggtcattaagaggaaagctctgataaggagatggatttctgaaggatttattcgtaaagaagacagatacactttgcatgagttaggagagaggtgttttaatgagctcataaataggagcttgattcaacctgctgcaagaaatacatatgataaggtggtgagttgccgagttcatgacacagttcttgatttcatcatatccaagtcaattgaagagaacttcgttactttagttggtgttcctaacgtaagtacagggatgcaaagcaaagttcggcgcctctctcttcaagctaaagatgaaggaaatttcatcctgccggcaaacctggtgttgtctcatgtccggtcacttaatgtgtttgggaatacagtgaaaatcccttccatgacagagttcaggcatttacgggttctcgactttgggggttgccgccaattggaaaaccaacatctggtcaatatagggaggttgtttcagttaaggtacttgaacctcagacaacttggggtaagtgaacttccagaacaaatcaagcatctgcaatgccttgagatgctggacctgagagacaccaatgtaagtgaattaccaacagcgattgttactctcggtagcttggtgcatctacttgttgacaattgtgtcacatttcctgatggagtttcgaagatgcaagcattggagatgttgaaacgggtcagggccttcaagcagtcatctaactttctccgagaacttgggcagctgaagaatctgaggaagatatatcttgatctgtttgatgttcctgtagctggggttaccaaggagtgctgcaagaattccactgcctatcaatctctccgcaacctaggcacacaaaacctccgttctgtaacgatctggaatggcggcagcttcttacagcaaccatggtgcccgactccgcttggcctcaagaagctcatgacctggcgttcagcagttcctcaggttccaggctgggtgggttccctggtcaacctgcaaaagttacgccttgaagtggagagtcttgggccggaagatctgtgcatacttggaagcttacccgctcttctcactctggatctcgaggaaacaacaaagtcatcgaaaggcaagctcagtgtcagtggaggacacgggttccgatgcctgaggaattttcgttataatatgatgctaatgtttacaaaaggatgcatgcccaggctggaaaggatcaatatttatctcagcatagctaatacagagtctctctccggcgttgacacctacgatttcggtgttgagaacctcccctgcctcatctctgttgagtgcagagtgagtggcaccaccagcgctgaaggtcttgaggctgcaaaggctgccatggagagagcagctatgacaaatcccaaccatcctaacctacaccttctgaatttccatgttgggtgc

SEQ ID NO: 136 - protein, 918 aa, Aegilops longissima
MEAALVSAATGALKPVLEKLAALLGDKCRRFKEVRDEIKFLTDELAAMHSFLLKMSEVEDPAVQDKAWMNEVRELSYDIEDNLDDFVARVDDDRSAKPDGFMEKIKYLLDRTKARHGIAKAIQGLKKQVVVVGKRHARYATGEAISKPSNAMVDPRALAIFKDVSKLVGIGGPKDKIIQLLAKPTQQQPRVVSIVGFGGLGKTTLANQVYKELVGQFDCHAFLSVSRNPDMMKVLRTILSQVTRKDYVNTEAGDEQQLITEISCFLLDKRYFVVVDDIWNIDEWNVIKCAFPITSLGSRIITTTRNNDVAQSCSSSIKENIYEIKPLNVMHSRQLFHIRLFNSEEDCPSHLKEVSDQILEKCGGLPLAIIAISGLLANTESTNDQWDRVKNSIGCALERNPSIEGMIKILSLSYFDLPPHLKTCLLYLSIFPEDQVIKRKALIRRWISEGFIRKEDRYTLHELGERCFNELINRSLIQPAARNTYDKVVSCRVHDTVLDFIISKSIEENFVTLVGVPNVSTGMQSKVRRLSLQAKDEGNFILPANLVLSHVRSLNVFGNTVKIPSMTEFRHLRVLDFGGCRQLENQHLVNIGRLFQLRYLNLRQLGVSELPEQIKHLQCLEMLDLRDTNVSELPTAIVTLGSLVHLLVDNCVTFPDGVSKMQALEMLKRVRAFKQSSNFLRELGQLKNLRKIYLDLFDVPVAGVTKECCKNSTAYQSLRNLGTQNLRSVTIWNGGSFLQQPWCPTPLGLKKLMTWRSAVPQVPGWVGSLVNLQKLRLEVESLGPEDLCILGSLPALLTLDLEETTKSSKGKLSVSGGHGFRCLRNFRYNMMLMFTKGCMPRLERINIYLSIANTESLSGVDTYDFGVENLPCLISVECRVSGTTSAEGLEAAKAAMERAAMTNPNHPNLHLLNFHVGC

SEQ ID NO: 137 - DNA, 2379 bp, Aegilops longissima
  CDS (1)..(2379)
atggtcaccgtgtctcagagctccgatctggagacaatcctgaggagcatagagaatcaagtcaagccaccgacaagcaatcagcagaagcaaggcggatctggggagagccgtttcacagcagccgtcaaaggcgcccgggatcaggtcagccgaggaacttcagccatcatggccaagtgctgcagctccggcgcctccgaagaagacaggacgaagctggatctgctcaagaatggccttgcaaaccacttaaaggaaaacagttacttgatcttgattgatgacgtctggtctgcgacgacactggataatattataaatgcacttcctgataacaaagacagcagaataatagttactacacggtttcatgctgttgctacaacaagaagagaaggtgacattcgtaaagtgaaaggtctggctgacaaagagtctgaggagttattcagacaggccttccatgagtccaaaggaagcaaatatgtcattagagggccccaagctcctggtacaacttcgaagatggaagaagctgattttgctcataacattgccatcatcgacagtgacaaacctgtgcagttatctgagccatcggtctctggacccagtgatagtaaagatgttacatttccggacaaagtctggaaaatgtgtggggggctgccattggccatagttaccatggctggtcacgtggcctgcaatccacgcagatcgcaggacgaatggttggacctttgcagttctgcattttcggagtcagtgaaagatcatgggaaagatgctgggaaagagattacccaggaggaagtgggcagaatagttagccattgctataatgacatgcctgctgaaatcaagacttgctcgttgtatcttagcatatttccgaagggccaaaaaatcagccggaagcgtttgacaaggcgatggatagccgaaagttttgtctgcgagaagcaggggctgagtgtggaggatgttgcagagacatacttcaatcatctcataagaaggaagatcatccgaccagtggagcacagcagtaatggaaaagtgaagaaattcatagttcacgacatggttcttgagcacattgtagcaaaagcaagcgaagagaatttcatcactgtggttggtggtaactggctaatgcagccgcctagcagcaaggttcgtcgactgtctctccaaggtggtgattccaaacgcgcaaaggatactgagaagatgaacttgtctcatgtccgatcagtgaccatgtttgggagtttgcaccagatgccttcccattcattcaagtttggaattgtacaagtattggatcttgaaggctgcacaggtttgaaagggcatcatacagaggaggtatgcaagatggttcttctcaagtatctcagcctccgaagaactgacactaaacggctgcccaaaacgattgggaagcttgagaatctagagactctggatattagggaaacaaatgttgttgagctgcctaaaacagtatgccagcttgaacggctggttaacatacttggtggggataaaagaacacggaaggccctgaagattcctgaagagttgattaagaagaagaaaatgaagtctctgcgcatattgtcagggattgagatcattgagggttcagaagaccttcatcatttgaccgagttgaggaagcttgccatctacaagctcaaaaccatcggggaggatgcaactttcaaagatttaagctcctctatccagtatctcggtggtcactctctacgcactctcgtagttgatggtgagtcttctgagtttattagatcccttgatgatctatctacccctccaaagttccttgttgcccttgaaatatctggtaagattatcaaggtccccagttggatcacggaactcactgctctcaccaaggtaaccctttcagtgacagcttttcggacagataacttgaaggtgctcagcaatctggaggtactgttttgtctcagcttttcactgatggcagtaaatcaggatgcagaaacactgaccattcttgctgaaaacaagctgcactccaatggggaggtcatagttcctgacgggggatttaagagtcttaagcttctccgcttctctgctcctctcttgccactgctgagcttttcaaaagatgccatgccagagcttgagaggcttgagctacggttcagcatgttggagggccttttcggcgtggaaaacctcgcagaactcaaagttgtgcatatgacattggaggacaaaggcggtgaaggtatgaccaagaaggtagcaggtgagctggagagagcagtgaaggggactggaggtaaaactcccaagataattattcaacag

SEQ ID NO: 138 - protein, 793 aa, Aegilops longissima
MVTVSQSSDLETILRSIENQVKPPTSNQQKQGGSGESRFTAAVKGARDQVSRGTSAIMAKCCSSGASEEDRTKLDLLKNGLANHLKENSYLILIDDVWSATTLDNIINALPDNKDSRIIVTTRFHAVATTRREGDIRKVKGLADKESEELFRQAFHESKGSKYVIRGPQAPGTTSKMEEADFAHNIAIIDSDKPVQLSEPSVSGPSDSKDVTFPDKVWKMCGGLPLAIVTMAGHVACNPRRSQDEWLDLCSSAFSESVKDHGKDAGKEITQEEVGRIVSHCYNDMPAEIKTCSLYLSIFPKGQKISRKRLTRRWIAESFVCEKQGLSVEDVAETYFNHLIRRKIIRPVEHSSNGKVKKFIVHDMVLEHIVAKASEENFITVVGGNWLMQPPSSKVRRLSLQGGDSKRAKDTEKMNLSHVRSVTMFGSLHQMPSHSFKFGIVQVLDLEGCTGLKGHHTEEVCKMVLLKYLSLRRTDTKRLPKTIGKLENLETLDIRETNVVELPKTVCQLERLVNILGGDKRTRKALKIPEELIKKKKMKSLRILSGIEIIEGSEDLHHLTELRKLAIYKLKTIGEDATFKDLSSSIQYLGGHSLRTLVVDGESSEFIRSLDDLSTPPKFLVALEISGKIIKVPSWITELTALTKVTLSVTAFRTDNLKVLSNLEVLFCLSFSLMAVNQDAETLTILAENKLHSNGEVIVPDGGFKSLKLLRFSAPLLPLLSFSKDAMPELERLELRFSMLEGLFGVENLAELKVVHMTLEDKGGEGMTKKVAGELERAVKGTGGKTPKIIIQQ

SEQ ID NO: 139 - DNA, 2373 bp, Aegilops longissima; identical to SEQ ID NO: 119
  CDS (1)..(2373)

SEQ ID NO: 140 - protein, 791 aa, Aegilops longissima; identical to SEQ ID NO: 120

SEQ ID NO: 141 - DNA, 2691 bp, Aegilops longissima; identical to SEQ ID NO: 115
  CDS (1)..(2691)

SEQ ID NO: 142 - protein, 897 aa, Aegilops longissima; identical to SEQ ID NO: 116

SEQ ID NO: 143 - DNA, 2763 bp, Brachypodium distachyon
  CDS (1)..(2763)
atggcggaggcggtgatgggtccgttggtgggtcggctgcaggagctggcgatgagcgaggcgcgggcgatggtggcggtgaacgacgacgtacggagcctccgggacaagctcatgtggatgcaggctttcctccgggaggccgagccccggcggcgggccaagaacgacgagctcatcagggtctgcctgcagcagacccgcgatgccgtcttcgacgccgaggacgccgtcgaccattacttcctccaggtcgacctctccaggtacccaaactggagtcatgcaatcctcaagttcgtcagcggcttcaccacacaagtccgtgtgcggcaccatctctcaaggaggatcaaatcgatcaacacgaggcttgagggcattgtggagaacaaggggaagtacaaaattgatgacacaactgacgataactcaatcaccacttggagaccatccactgccatctcagctatcactgaaaacatgagtgattttgtgctacctttggtgggccgtgaaaccaagatagaagaacttggagatgcactatttgataaacaaagtgtggttccagttgtgatctgtgtgacaggaaagagtggtattggcaagacaaagcttgtgaaggagatctacaagaagcctttgaccaagcgtaattttgatgtgcaggtatgggtgacctgtgcacctaatctcagtgccactaacatcaagaagctaattcttcagcgtatgacaaaagacacggttagaagccccactgaacagttgcaaaggaaactaggaaataagaagtatttggtggttatagatggtgaaactagcaacacggagtggaaaaagatactattggacctcccaaaggacaaaaccgagagcagagtagtgaaaatcacacatgcaaccaaacaagaaacaacggtgtctggctttaaacaacacatcatcgagctcaatcccattggaatcaaagatgtaactaatatgttcatgaatacacttctcatggacgagaaagttgggaagaagtctcgcggtcaagttgaggaggctctcacgagagatggagatggaagttacattaatgcgaatcggatcttcaaagtcactgaaggtctgccactagcggttgtgctcttgtctggccttttgcggaccaaggagtaccctagagaatggaaaaaggtgtttgatcacctcgagggcaagtccaatgaatggaagcctcttgacatcatactatctatgtgcttggatgatctcccacatgacctgaaatcttgcttcctctactttgccggtttcccagcaagcacacttgtcaaggcgcgcagcttggtgtgcatgtggatggcagaggggctcctcagaccaaaagagggcaagacaatggagaaggtgggtaagaaatacttgcatgagctgctctgtaggggcctgatgaactttccaccgttggagaatgccactcctgggaatgaacgtgtgaccgtccaaaccaaagtccatgaatttctgctaattgaggctcaagaggcaaatttcatggagatccacgatggtgatgatgtaccaacactatctaatgctcgccgccttacactccagaatcacaaggataagtatgctgctctcaccgaccctttacccaagttgcggtcaatcatgtccaacttcgagaaagatgattcccaaggcagtgttgctgagaccaaggaagaggaggagatagctggggctaatgcctgctcccccatccccctttgcctccgtccacacaaggatagggtcaactccaaggatcatatgcgtaagctcctgcaaggatcccagttcctccgtgtcatttgcttgtgtggattggaagtcggtagcaaacttccatccgagatcgggagtttggtgcacttgcagtacctcggcatcacctattgcttcctcaacgagataccatcgtcggtagggaatctcacacgtctccaaacattggatgtccaaggcacatccgtcaccaaacttccccaggagttatggaggattccgacattgcgacatgtgtttggattcatcgtcttgcctaggcgagtcggtgacttggagcagctgcaaacactggaggctgtaaagcctgatgatgccggtgttacagctagtgatagctgctgggatgcaaaaaccttcgccaacatgaagcgcctccattccttgtacatctgggacatctccaataaaaatgtcaagtgtctggaagctgtctacggactcaagtacctcgtgctcctaagtattcagggaaaagtaatttccttggatttgttcactcgctccaagctatcccgcctccaggaaatggttttgaaggggaagattgtggcaccgacgacacctttaactgcaagtaaccgcttcttcttcccaacactgacaaagctgtctctcaataagaccaaggtgtccaaagacttcatcgacagactaagtgaagatctgcctcttcttgctacccttgctctattccgagactcctacagcgagtcatgtcttgtcttcactaatgggtttcacagtctcaaggaactaactctggacgtgtatctagaggagattgtcataaaggaggaagcatgtcctgatcttatgaagctggaggtagtcgttcactatttgaatctttgcattgacatccctaacaaaccaagcctcaaggatacaatacaggatatgatgaagcagcgtacaattgaggttaatcgcgattgg

SEQ ID NO: 144 - protein, 921 aa, Brachypodium distachyon
MAEAVMGPLVGRLQELAMSEARAMVAVNDDVRSLRDKLMWMQAFLREAEPRRRAKNDELIRVCLQQTRDAVFDAEDAVDHYFLQVDLSRYPNWSHAILKFVSGFTTQVRVRHHLSRRIKSINTRLEGIVENKGKYKIDDTTDDNSITTWRPSTAISAITENMSDFVLPLVGRETKIEELGDALFDKQSVVPVVICVTGKSGIGKTKLVKEIYKKPLTKRNFDVQVWVTCAPNLSATNIKKLILQRMTKDTVRSPTEQLQRKLGNKKYLVVIDGETSNTEWKKILLDLPKDKTESRVVKITHATKQETTVSGFKQHIIELNPIGIKDVTNMFMNTLLMDEKVGKKSRGQVEEALTRDGDGSYINANRIFKVTEGLPLAVVLLSGLLRTKEYPREWKKVFDHLEGKSNEWKPLDIILSMCLDDLPHDLKSCFLYFAGFPASTLVKARSLVCMWMAEGLLRPKEGKTMEKVGKKYLHELLCRGLMNFPPLENATPGNERVTVQTKVHEFLLIEAQEANFMEIHDGDDVPTLSNARRLTLQNHKDKYAALTDPLPKLRSIMSNFEKDDSQGSVAETKEEEEIAGANACSPIPLCLRPHKDRVNSKDHMRKLLQGSQFLRVICLCGLEVGSKLPSEIGSLVHLQYLGITYCFLNEIPSSVGNLTRLQTLDVQGTSVTKLPQELWRIPTLRHVFGFIVLPRRVGDLEQLQTLEAVKPDDAGVTASDSCWDAKTFANMKRLHSLYIWDISNKNVKCLEAVYGLKYLVLLSIQGKVISLDLFTRSKLSRLQEMVLKGKIVAPTTPLTASNRFFFPTLTKLSLNKTKVSKDFIDRLSEDLPLLATLALFRDSYSESCLVFTNGFHSLKELTLDVYLEEIVIKEEACPDLMKLEVVVHYLNLCIDIPNKPSLKDTIQDMMKQRTIEVNRDW

SEQ ID NO: 145 - DNA, 1857 bp, Aegilops longissima
  CDS (1)..(1857)
atgagtaatatttatggccaattgaatcatgggtattctggtggcggcacggagaacttgcagacactcctcgcaaagattttggagttcctccaaaacaaaaggtacttaattgttgttgatgatatatggaaggtcgatgattggaatgctatcaagtgtgcatttcccagaacaagtccggggagtaagataatcaccactactcgtataaatgatgtcgctgaatcatgttgttcatcatttagtggccacatatacaatttaaggcctcttaatatgatgcaatcgagacaattgctgtatacaagactattcaactctgaagagaaatgcccttcggaccttaaggaaatcgctgaccagattttgcagaaatgtgatggcttacctttggcaatcgttgctatatctggtgtcttggctcacaaggcaagtaaaaaggataaatggaatcaagtgaaggactcaattggtcgtgcactaagaaattctagcgttgaagcaatggtaaatataatagcccttagttacttggatcttcctcgtcatctcaaaacttgtttgttgtatctgagtatatacccagaagatcatattatcgagaaggagaacttgataaagagatgggttggcgagggatttatatgtaaagagagcagtcgtacaatgtatgagtcgggagagatatatttcaatgacctcatcaacaggagcctgatccagcccacggggattgatgggaaatgtagtgaggtcaagagttgccgagttcacgacactgttcatgatttcattgtgtcgaaggccgtggatgagaactttgttactgtaataggtgtacctggtgtagatcatgatccacagatgaaggttcgtcggttgtccctgcagaacaagggagagattccggcgtgtctgattgtatctaatgctcggtcactccatgttttcgggcgtaatgcgaagattccgtccgtgtcgcagttcgggctcttgcgtgtcatggactttgaagactgttggcagttaaaggattatgaccttgctggcatcggaaatttgctgcacctcaagtacctgaggctcaagcacacaggtgcactcaaagggcttccggaagagctagcaaggctgcaggagttgcagattgatatagatggatccgtctacgagatggaattcccagaagccttccagcggctggtatgtaatgtagctctatatcttaatgggcataataaggtgccggatgagacggcatccgtgcaaaggctaagagtgttggaaggtctaggtgtctaccttcagtcagttgagtttctcaaggggcttgggcaactgaaaaacctaaggaggctgggcatggtattaatctactaccattgtggccgtgattgggaggcgaatctgaagcaggcacaatcttccgtgtgtgagctgggaaaagcaggactcgagtctctgcacctttacatcgacgaggaagcggttgagatcttggagatggattcatggttctccgttcctccttatgccctgcgggagcttgtcatcgaggggaaatcagtcacaagagttccgacatggatggcctcgcttgtcaacctcgagaaactgcacctccgcatatataagatgcctgaggaagaggtgaagatcctgggtggcctgccatctctgcgtcatctctgtatcgagtgggctgattttgattatgacgacatgtttgacgacccccccatggaggtggttgaggctgctgtacggaaagccatggaagaccatcccaaccgtcctaccttggtctggacaactgagtgggacccattgcctagcttctcgcagctcccaagt

SEQ ID NO: 146 - protein, 619 aa, Aegilops longissima
MSNIYGQLNHGYSGGGTENLQTLLAKILEFLQNKRYLIVVDDIWKVDDWNAIKCAFPRTSPGSKIITTTRINDVAESCCSSFSGHIYNLRPLNMMQSRQLLYTRLFNSEEKCPSDLKEIADQILQKCDGLPLAIVAISGVLAHKASKKDKWNQVKDSIGRALRNSSVEAMVNIIALSYLDLPRHLKTCLLYLSIYPEDHIIEKENLIKRWVGEGFICKESSRTMYESGEIYFNDLINRSLIQPTGIDGKCSEVKSCRVHDTVHDFIVSKAVDENFVTVIGVPGVDHDPQMKVRRLSLQNKGEIPACLIVSNARSLHVFGRNAKIPSVSQFGLLRVMDFEDCWQLKDYDLAGIGNLLHLKYLRLKHTGALKGLPEELARLQELQIDIDGSVYEMEFPEAFQRLVCNVALYLNGHNKVPDETASVQRLRVLEGLGVYLQSVEFLKGLGQLKNLRRLGMVLIYYHCGRDWEANLKQAQSSVCELGKAGLESLHLYIDEEAVEILEMDSWFSVPPYALRELVIEGKSVTRVPTWMASLVNLEKLHLRIYKMPEEEVKILGGLPSLRHLCIEWADFDYDDMFDDPPMEVVEAAVRKAMEDHPNRPTLVWTTEWDPLPSFSQLPS

SEQ ID NO: 147 - DNA, 2877 bp, Aegilops longissima
  CDS (1)..(2877)
atggagggcgcggcgcagaccattttgagcaatgttgggcaggttgtggggcaggagttccggcagctcagcggcgtgggtggcgaggtcgcggagcttagggacgagctggcgaccatgaacgccgtccttcgcatgcagtctgaagccggggacggtgccgtggaccacttcgtccgggagtggatgaagcagctgcgggagctcgcctacgacgccgaggattgcgtcgacctctatttattccggatcaggtgccggccgggcgacggcttactcgtctggtccaagcgcctgcttgtgacgcttttccatcgccatcgtctcgccggtgacatcgcagccctccgcgcccgtgctgtcgccatcagcgagcgccatgctcgttacggcgtcggccgcgagacgctgcggtgccctgcttcttccgccccagcgccatcgtcggcgtatgagctccctcttgccaagcactccaacctgttggtcggcatcagggaccaggctagcagcctagtcgacaaggtgaaggcgttggatgagaacgacaaggagctcaaggtgttctctatcgtcgggttcggaggccttgggaagaccacgctggccatggaggtctgccggcagctggagacggagttccagcgccaagcgcaagtgtccgtgtcccaggcgttcaccgggaaggacctcagggaattcctgaagcgcgtgcttctgcagatcgcgcagccgaagcagacggcgcacaaggagccccaaaatgcagcccatggcgccggcttgggtaacgtcgacgacatggatgtaccccagctggaaagcaagctcaaagagattctcgagaacagcaggtacctcattatgatcgatgatgtttggagtatagcagcctgggatgcaatccgttctaggttaccaagcagcaattgcggcagcagaatcattgtgaccactcggatagatactgtggcaaaagcatgcagtgctaatgatggttacatacatcatatgaaggccctcattaagaaagactccatgaagttgttcctgtgcaaagcgtttggctcaatgactgataactcgtgccccgaggatttgaaagtagaaatggataacatcttaggaaaatgtggtgggctaccgttggccattgttagcattgccagccttctatcaagctataaacctcctgaaggcaaagatatgtggacaaaagttcaggaatcaatcggttcactgatggaaaacaacccttcccttgaagggatgagaagaatactcacacttagctatgaccacctacctcatcacctcaagtgttgcatgatgtaccttagcattttcccggaagattatgtcattccgaaagatcggctgttgaggagatggattgctgaaggattggttgcggagaagcgggggatgacccgtatggaacttgcggaagcctacttcagtgagctggtcagtagaagcatgattcagcgggccgctgatatagtcacctggcatgatgggagggtagagacatgccgtgtgcacgacatgctgcttgagatcatggtgtccaaatccctagaggctaattttgttagcctggtgggtggacagtatgaagggatgtcgtatgacatggctcgccgtctctccatacatggtggagcagaggcacccaaggactggtcatcaaagaaaaatgcagtgcaccgtggtacaaggagcgacatcaaggtgatgactgtgcagcatgtccgatcactaagcatatttgatcctgaagtgcacaagctgctgcttggtcggctaggtgagttcaccttggtaagggtacttgatctggaagattgcaagggcctagaaaaaaagcatatgaggcatatctgcaggatgtatcttttaaggttcttgagcttgaagggcacagatatcaaggagatgccttcgagagttggtgatctcgagcatttgcagacacttgatgtacgtcaaacacgcctgaagtgtctgccaaaaacggtaacaaaactagagaagctggagcacctgctgttctccatcaagggtacgttctggtctgggtggatgctgccccaagggatcaacaaaatgaaggcactacgccaagtgaataaagcggttgtgatatacgacccaatggtcgccaaggagatcggcgaactggatcagttgcaagagcttggtatctatgtggacacgagagaggatgtaaatcaggaggttcttgaagagcttgcatgctccctgagcaagctatattccctaaggtcactcgacattggcaactttggatgtgatcaatggcctttcaagcagataatgcaatttctgcatgatgtgaaatcgccaccacgacttctccaataccttaggatctatggccgcattgacagtttgcccgactgggtgagttcactcgcagatctcgtcgagtttgacatagcgtggacataccttgatggtgagcaactatttaacgtcctgtgtaagttgcccatcctgaagaggctgaccttgggggcttacttctgctggcatcaagaaactattgtgtttggtagtacccaatcatttccagagctcaaggaactgactctgaactattctcctgaagttccagaagtttaccaatttaagcaagggtccatgccaaagctcgagacactcgaggtgcatttcggagaccaggagaagaaagttgatggcatccagcatttgacaaagctgaaagaggtgcagtacagtggggtgaaggccaacaaagggctgatacttgcagtagaggagctaaatgaggagaatgagaggcgacatgagtcagagcagttcaaaattagagtgaggtatgacgacatg

SEQ ID NO: 148 - protein, 959 aa, Aegilops longissima
MEGAAQTILSNVGQVVGQEFRQLSGVGGEVAELRDELATMNAVLRMQSEAGDGAVDHFVREWMKQLRELAYDAEDCVDLYLFRIRCRPGDGLLVWSKRLLVTLFHRHRLAGDIAALRARAVAISERHARYGVGRETLRCPASSAPAPSSAYELPLAKHSNLLVGIRDQASSLVDKVKALDENDKELKVFSIVGFGGLGKTTLAMEVCRQLETEFQRQAQVSVSQAFTGKDLREFLKRVLLQIAQPKQTAHKEPQNAAHGAGLGNVDDMDVPQLESKLKEILENSRYLIMIDDVWSIAAWDAIRSRLPSSNCGSRIIVTTRIDTVAKACSANDGYIHHMKALIKKDSMKLFLCKAFGSMTDNSCPEDLKVEMDNILGKCGGLPLAIVSIASLLSSYKPPEGKDMWTKVQESIGSLMENNPSLEGMRRILTLSYDHLPHHLKCCMMYLSIFPEDYVIPKDRLLRRWIAEGLVAEKRGMTRMELAEAYFSELVSRSMIQRAADIVTWHDGRVETCRVHDMLLEIMVSKSLEANFVSLVGGQYEGMSYDMARRLSIHGGAEAPKDWSSKKNAVHRGTRSDIKVMTVQHVRSLSIFDPEVHKLLLGRLGEFTLVRVLDLEDCKGLEKKHMRHICRMYLLRFLSLKGTDIKEMPSRVGDLEHLQTLDVRQTRLKCLPKTVTKLEKLEHLLFSIKGTFWSGWMLPQGINKMKALRQVNKAVVIYDPMVAKEIGELDQLQELGIYVDTREDVNQEVLEELACSLSKLYSLRSLDIGNFGCDQWPFKQIMQFLHDVKSPPRLLQYLRIYGRIDSLPDWVSSLADLVEFDIAWTYLDGEQLFNVLCKLPILKRLTLGAYFCWHQETIVFGSTQSFPELKELTLNYSPEVPEVYQFKQGSMPKLETLEVHFGDQEKKVDGIQHLTKLKEVQYSGVKANKGLILAVEELNEENERRHESEQFKIRVRYDDM

SEQ ID NO: 149 - DNA, 2820 bp, Aegilops longissima
  CDS (1)..(2820)
atggagatcgccatggtggccatcaggcctctccttacgaagcttggcgacctgctcgctggtgagttcaccctggagaagcgcgtgaggaaaggtatggagtctcttgtcacagagctaaccttgatgcacgctgcccttcgcaaggtggcaaaagttccgccagagcagcttgatgagggggtcaaaatatgggcagaaaatgtcaaggagttgtcctaccaaatggaggacatcgttgacaccatgatggtgcatgtggaagatgacggtgagcctgtcaaccagaatagaatcaagaagttgatcaagaagatcatcaaattattcaagaacggaagggatctgcatcggatgtctgactctctagaagaggtgatgggtcaagctaagcagttggctgagcagcgcaaaagatatgagcaagagatgcgggacaccagtgctggtgctggcgttgaccctcgtgtgttggctctatacacagatgtgacagagattgttgggattgaacaagcacaagacaagttgattaacatgttgactgggggtgatgattggttgaagagtccaataaagacaatatctgttgttggatttggtgggctgggaaagactactctcgcgaaagtggtgtatgataagatcaaagtacaatttgattgtggggcctttgtttcagtttctcagaatcccgacatgaagaaagtcttcaaggatattctctatgagttagacaagaagaagtattcatgcattcatagtgcaataagggatgaaaaacagcttatcgatgaactcattgaatttcttacgagcaagaccgaatttcttaagagcaataatgaattccttaccaacaagaggtacatcatcgtaatcgatgacatatgggatgaaaaattgtggcgtttaatcaagtgtgctttccccaagaatagtcttggaagtcgaataatcacgactactcgcattgttagtgtatccaaagcatgctgctcttctagtgatgatattttcagaatggaatttctttctggtgacatctctagaaggctcttctataagagagtattctctaatgagagggggtgtcctcatgaactggtgcaagtatcccaagacatcttaaagaaatgtggtggtataccattagccattattaccatagcaagccttctagcaagtaatcatcaaacaaaagcaaaagatcagtggtatgctttgctcaattccatcggtcatggacttgcagaagatcacaatgtggaggagatgaaaaagatactattgtttagctattatgatctgccatctcatctgaagccttgtttattatatttaagcatatttccggaaaatttcaaggtcttaagagttgacttgatatggaggtggatagccgaaggctttgttcatagtgaaaaacaagaaactagcttatatgagctcggaaataattatttcaatgagctaataaatagaagtatgatacaacccataggcattgatgatgaagaaagggtagatgcttgtcgggtacatgacatggtacttgatctcatacgtaccttgtccactgaagaaaactttgtcactattcttgatggtactatgagaaaagtgtctaacttgcaaagtaaggttcgcagattatccatccgaaatggcaagatggatatttctaccaccagcatgaaacaagtgagatctcttgcttttttcacacatggtataattgccaaagtacagctgagtatctgcagttttgaagttctgcgtgtgttggatttagaaggttgtactgtttcagatcctgggtatacgaggaatttattacacttgaggtacctacggctgatacatgcacatgttaatgagctcccagtggaaataggaaagttgcaatttctgcagacactggacttgagacgagctcgtggtataaaagaactaccgttgagtattgtccgtctacggcatttgatttgcttgtacgttcacgagggcatgaagatgccatccggaatgtgtaacctcacgtccctagaagtgctagacggactgctggtaggccagttatcttcaggcaattttaatcaagacactgcaaaagagttgggccaactgaccaagttgagtgtgctccggtttaaatggagatgtatcaatgacatcactgataaaactttggttgagtccctaagtaacctgcacagaatacaaaatctagatatttgtgcagatggcggtcgacatgtcgatctcatgcgtgaaggctgggttcctcccccacagctccatagattgcagtttcagggaaccacctgctcattccagactctgccaacatggattaatccttcaacgcttcctttactttcttacctggaaatatgggtggaggaagtgcgaccggatgacattctgctcctcgggttgttgcccgctctgcgctctctctccctggtgcgcagtactacattctcagggggggctgcagtggaaatgtcagtcgtcgccgctgatgcattcccatgcgcgacggagtgccgcttcatcggtgtcgccgcagtgccatctatatttccacaaggagctatgccaagggttaaactcctccgctttggcttccccgccgtgtggatttcccgtggcgactttgatttcggcatgggacacctcccttccctgaagtatgtccaggttgagcttctgtgtgaaaaagcaactgacgtcgagctggaggaagcagatgctgcagtgagggccgcagtggaggaacatcccaacggcgtgcacctttatttgtccagttgg

SEQ ID NO: 150 - protein, 940 aa, Aegilops longissima
MEIAMVAIRPLLTKLGDLLAGEFTLEKRVRKGMESLVTELTLMHAALRKVAKVPPEQLDEGVKIWAENVKELSYQMEDIVDTMMVHVEDDGEPVNQNRIKKLIKKIIKLFKNGRDLHRMSDSLEEVMGQAKQLAEQRKRYEQEMRDTSAGAGVDPRVLALYTDVTEIVGIEQAQDKLINMLTGGDDWLKSPIKTISVVGFGGLGKTTLAKVVYDKIKVQFDCGAFVSVSQNPDMKKVFKDILYELDKKKYSCIHSAIRDEKQLIDELIEFLTSKTEFLKSNNEFLTNKRYIIVIDDIWDEKLWRLIKCAFPKNSLGSRIITTTRIVSVSKACCSSSDDIFRMEFLSGDISRRLFYKRVFSNERGCPHELVQVSQDILKKCGGIPLAIITIASLLASNHQTKAKDQWYALLNSIGHGLAEDHNVEEMKKILLFSYYDLPSHLKPCLLYLSIFPENFKVLRVDLIWRWIAEGFVHSEKQETSLYELGNNYFNELINRSMIQPIGIDDEERVDACRVHDMVLDLIRTLSTEENFVTILDGTMRKVSNLQSKVRRLSIRNGKMDISTTSMKQVRSLAFFTHGIIAKVQLSICSFEVLRVLDLEGCTVSDPGYTRNLLHLRYLRLIHAHVNELPVEIGKLQFLQTLDLRRARGIKELPLSIVRLRHLICLYVHEGMKMPSGMCNLTSLEVLDGLLVGQLSSGNFNQDTAKELGQLTKLSVLRFKWRCINDITDKTLVESLSNLHRIQNLDICADGGRHVDLMREGWVPPPQLHRLQFQGTTCSFQTLPTWINPSTLPLLSYLEIWVEEVRPDDILLLGLLPALRSLSLVRSTTFSGGAAVEMSVVAADAFPCATECRFIGVAAVPSIFPQGAMPRVKLLRFGFPAVWISRGDFDFGMGHLPSLKYVQVELLCEKATDVELEEADAAVRAAVEEHPNGVHLYLSSW

SEQ ID NO: 151 - DNA, 1860 bp, Aegilops longissima
  CDS (1)..(1860)
atgacatcaagaaagcagacagtgttgtcaactacggagtctgcaactgcaattcacttggaaccattacaagcacatcactcatgggtgttgttctgcaaaggggtattttggaatgctgatgacaaaaagtgcccgttggagctgcaggaattggctcggaagttcatagcaaagtgtcaaggcttgcctattgctattgcatgcattggccgcctactctcctgcaaaccccaaaattccactgaatgggaggatgtgtacaggtgtttggactcgcaatttgcgaaagatgtgatccctgacgctcatttgatcctaaaggtcagcttggaggaccttcagtatgatatgaagaattgtttcctacactgtgcattgtccccagaagattatgtattaaagaggagaagaacattgaggaaatggattgcagcagggtttatcacgaataaggaagagaacagaacattggaggaagtagcagagggatacctggttgagcttgtgaaccggagtctattacaggtagtggaaaggaattatgctggacgacttaaagaatgtcggatgcatgatgtcatacgccttcttgccctcaacaaagccaaggaggaatgctttggtaaattttatgacaactctactgctaatggggcaacctctattgagggtgcacgccgcatatctgttcttggcaaaaaccttgaacacctgagccgatctggtgccacacagctccgtgagctccaagtatttgagaggtctatcaacgttgatcagttgaagcctatcctaacatcttcaaatttgctgacgacgttggatctgcaaggtacttgtatcaaaattctgcccaacgaggtatttgacttgtttaatctgcgttatttgggtcttagagatacgcagatcgaaagcctgcctgaagcagttgggaggttacaaaacttggaaatcttggacgcttatgattctaaattgacgtacttgccaaagagtgttgtaaagcttcagaagttgaggtacctgtatgcgtgcactcccgccacatcagaaactgcaactataggtggagtcaaggtgcctaatgggatgcatcacttggcaggattgcgggctcttcagtccatgaaagccactccagagtttctgcgtgaagttgcagctctgacagagctaaggacattcagtgtctgtgatgtgagaagtgaacactctgctgacatgagcaatgctatcaccaaaatgagccatcttgcccatctccaaattcgagctgcagctgaagatgaggtgttgcggctggaagggctacatttacctcagaccctttcttggcttggtttaggagggcagctagaaaaaacaacgatgcctcaacttttctcttcttggtcacaccttaatagcctcactcggttgtacctggcatcctctaatattgatgaggaaaccttttcctatctacacgtgctacatggcctacgctctcttatgctaagaaaggcttttgaagggaagatgttgaaattttacgcagggtcatttccagaacttcgggatctagaaatatggggtgcggcacagctcaaccaagttggaatagaggagggcgcgatgcaaaacctcgtcgggctatggttgggagactgtcccgagctaaagtttcttcctgatggcatcgaacaccttgcatcccttgagaaattaggtctgaaagatacgtcagaagagctgatagagaagctccggcagaagagagattcaaatgaatgcagcgaagatgtaaagaggattagccacataagaaatgttatagttggactgagccagaaaggactttgggaaaggattagg

SEQ ID NO: 152 - protein, 620 aa, Aegilops longissima
MTSRKQTVLSTTESATAIHLEPLQAHHSWVLFCKGVFWNADDKKCPLELQELARKFIAKCQGLPIAIACIGRLLSCKPQNSTEWEDVYRCLDSQFAKDVIPDAHLILKVSLEDLQYDMKNCFLHCALSPEDYVLKRRRTLRKWIAAGFITNKEENRTLEEVAEGYLVELVNRSLLQVVERNYAGRLKECRMHDVIRLLALNKAKEECFGKFYDNSTANGATSIEGARRISVLGKNLEHLSRSGATQLRELQVFERSINVDQLKPILTSSNLLTTLDLQGTCIKILPNEVFDLFNLRYLGLRDTQIESLPEAVGRLQNLEILDAYDSKLTYLPKSVVKLQKLRYLYACTPATSETATIGGVKVPNGMHHLAGLRALQSMKATPEFLREVAALTELRTFSVCDVRSEHSADMSNAITKMSHLAHLQIRAAAEDEVLRLEGLHLPQTLSWLGLGGQLEKTTMPQLFSSWSHLNSLTRLYLASSNIDEETFSYLHVLHGLRSLMLRKAFEGKMLKFYAGSFPELRDLEIWGAAQLNQVGIEEGAMQNLVGLWLGDCPELKFLPDGIEHLASLEKLGLKDTSEELIEKLRQKRDSNECSEDVKRISHIRNVIVGLSQKGLWERIR

SEQ ID NO: 153 - DNA, 2976 bp, Aegilops searsii
  CDS (1)..(2976)
atggagtctgcggcggcgagcgccttcctgaggagcgtgatgggaaagctgttccaagtgctggagaaggagtacaacaagcagaagggcctccggcaggagaccctctccatccagcaggacgtccgcatgatcgccgccgccatggacgaccgcctccgcgccttgcgcaggggcgagcaacgcaccgccgtcgcccggctgtacagcgaggagatgctcagcctggtgcacgacgcccaggactgcatcgaccgcatcgtgcaacgcctcacctgcaggccccgcggcggcggaaaaggagcggcgctggtccgccgggtcgcccacgagctcaagaaggtacagagccgctcgagattcgccgacgagatccacaagctcaaggcccgcctcaagaaggcgcacgaccgcgtcgtcggtatccccatccccgccgccgccagctgctgccacgagttcgccgcggcggcgccgtcgtgtcgcgtcgcgcgcgacccggtgggcatcgggaggcccgtggaggagctcctctcgctgctcgacgaggtggagggggagccggagcagctgagggtgatctccgtggtggggttcggcggcttggggaaaaccacgctcgcccgggaggtgtacaaggcccctcacgccgtggagaaattccactgccgtgcttgggtttccgccagtcggtggtcgccagaggtcaccggcaacggggtcactgagatcctgcgcgatgtactccagcaagttcgccccaaagacgccatggatgttgttgttgctgatgatggccaacgtattgaagccttgctcaaggaatacctcacggataagaggtatttaattgtcatagatgacattgggatggagcaatggagcactataaattccatctttgaaaacaatggcaaaagcagcagaatcctattgaccacaactattcagtcaacagctaatatctgcagccatggcaatggttatgtgtaccaaatgaacacacttggtgaagaggactccaagaaaatagctcttcaggaggtaccgtcacctgagctggagcaggggtccataacgctgctgcagaaatgtggtggtcttccacttgctctcgtcagtgtctccgatttcctgaaatgctcaggtgagcctacgggtgagcgatgcgcagagctatgccgtaacctgggttctcatctgagagagaagcatggccatgacaatttcacggaactaagaaaggtgctgatgcataactatgacagtttgtctgtgtatcctatgacctgcttgctatatcttggtgtattcccaaacaaccgtcccctcaagaggaaagttgttatcaggaggtggttagccgaaggatatgcacggagtgattctcttcgcagtgaggaggacattgcggatgagactttcaaggcgcttgttgaccggaatatcatacagtccattgatacaaggaataatgcgcaagtgaagacgtgcatgactcatggcatcatgcacgagtttgtgctgcacaagtctgtgtcacaggggttcatcgcgacatcgtctcgtgatcatccaagacctcatgcctatgttaataatgcctgccacctttctatccatggtggcaatgtgacagatagtgaggcctctgacgaggatttgtctcgtgttcggtctctgacagtctttggaaaagcaggtgatgctatttcttatgttcgtaagtgcaaactgctacgagtcttggatctggaagaatgcaatgacctggaagacagtcacctcaaacacataggcaagctatggcatctgaaatatctaagtgttgggggcatgattgcgaagcttccgagcagcatcgatggactgcatagtttggagaccctggatttaaggagaaccaagataaagactttgcccattgaggccattatgctgtaccacttagcccatctgttcggaaggtttacagttgacaaagaagatctaaacaatgcaaacaagatgagcaaagcaatgaagttcttgtccggaaacaagagcaacctgaagactttagctggatttgccacaaacgagaggcaagggtttcttcaacttatggttcacatgagaaatctgagaaaggtcaaggtatggtgtgggtcagttgcaaatggaagtaactacaccaatgatctttccaaggccattcaggaattcaccaaggtccccatggacaatgtgggtgcccgttctctatcacttgattcagaagaatgttccgaagacttgctgagttcgcttgcttttgagccatgccccgaagattccaaatatgatgtaaggtcactgaagctacgtggcaagctattccagttacccccatttgttcccttgctgtcaggtctcactgaactgtgtatttcatcagctactctgacacgggatcttctatcgtctctgatcaatttgagaaacttgctttatctcaagttgatcgcaagtgagcttgagaaatttgaaatgaaatcaggggcattcccaagcctgcggcgtctgtgctttgcagtgcaaagtttcgcttcatctctgccagcaatcgaacaaggagctctgccgaaccttgtctcactccatctgctctgcccaggtctagttggtctttccggcatccaaatcagacacctcagacatctcaaggaggtcacagttgactctggagtgcctgaccaaacaagacaagactgggagcacgcaacaaagaaccacccgaataggccgagactcatgttgcacaaaagtggtgttcgagtggaaagcgagggaccggggaatgaagaagcttctgccatgagggagaagcggaaaatatgtgtactccaaccaagtttggatgacggactggattctagtctcaagaagatgagactttcatcagattcttcttcgcggcttcaagtgatcgtccattccacttcttcatctggtcac

SEQ ID NO: 154 - protein, 992 aa, Aegilops searsii
MESAAASAFLRSVMGKLFQVLEKEYNKQKGLRQETLSIQQDVRMIAAAMDDRLRALRRGEQRTAVARLYSEEMLSLVHDAQDCIDRIVQRLTCRPRGGGKGAALVRRVAHELKKVQSRSRFADEIHKLKARLKKAHDRVVGIPIPAAASCCHEFAAAAPSCRVARDPVGIGRPVEELLSLLDEVEGEPEQLRVISVVGFGGLGKTTLAREVYKAPHAVEKFHCRAWVSASRWSPEVTGNGVTEILRDVLQQVRPKDAMDVVVADDGQRIEALLKEYLTDKRYLIVIDDIGMEQWSTINSIFENNGKSSRILLTTTIQSTANICSHGNGYVYQMNTLGEEDSKKIALQEVPSPELEQGSITLLQKCGGLPLALVSVSDFLKCSGEPTGERCAELCRNLGSHLREKHGHDNFTELRKVLMHNYDSLSVYPMTCLLYLGVFPNNRPLKRKVVIRRWLAEGYARSDSLRSEEDIADETFKALVDRNIIQSIDTRNNAQVKTCMTHGIMHEFVLHKSVSQGFIATSSRDHPRPHAYVNNACHLSIHGGNVTDSEASDEDLSRVRSLTVFGKAGDAISYVRKCKLLRVLDLEECNDLEDSHLKHIGKLWHLKYLSVGGMIAKLPSSIDGLHSLETLDLRRTKIKTLPIEAIMLYHLAHLFGRFTVDKEDLNNANKMSKAMKFLSGNKSNLKTLAGFATNERQGFLQLMVHMRNLRKVKVWCGSVANGSNYTNDLSKAIQEFTKVPMDNVGARSLSLDSEECSEDLLSSLAFEPCPEDSKYDVRSLKLRGKLFQLPPFVPLLSGLTELCISSATLTRDLLSSLINLRNLLYLKLIASELEKFEMKSGAFPSLRRLCFAVQSFASSLPAIEQGALPNLVSLHLLCPGLVGLSGIQIRHLRHLKEVTVDSGVPDQTRQDWEHATKNHPNRPRLMLHKSGVRVESEGPGNEEASAMREKRKICVLQPSLDDGLDSSLKKMRLSSDSSSRLQVIVHSTSSSGH

SEQ ID NO: 155 - DNA, 2814 bp, Aegilops searsii
  CDS (1)..(2814)
atggaggccgctgctggggcgttgagccctgtcctccgtaagctcggtgagctgctcgccggagaatacaacctggagaagcgagtaaagaaaggtgcacaatcacttcatacagaactggagatgatgcatgctgtacttcgtgaggttggcaaggtgccgccgcatcagctccaggagccggtccggatttgggctggcaaggtgagagatctgtcttgcgacatggaagacgctgttgacgacttcctggtgcgtgtgggtgagggttcaggcagcaagccaacggacatgaggagtcgagtcaataagttcctcaagaagaccaccacattatttggtaagggcaaagcacttcatcaaatttgtgatgccatcaaagaagctcaggatcttgccaaggagttaccagagctgcggaaaaagtacgagcttgacatgcgtagcgctagcaattgcgctaccgttgacccttgtgtgttagctctgcacaaagatgcaggggagcttgttgccgttgaccgcacaagggatgagcttattaaaacactaaattgtgaggatgggggtcctaaggagcaattgaaaacaatctctattgttggtgttggtgggctgggaaaaaccaccctcgccaaagcagtttatgagaagatcaaaagccaatttgattgtgcggcttttgtccccgttggtcagaacccagatattaagaaactttttaaggacttactctttggcctcgacaatgaaaagttcagtgacattcataatacagcaagggatgaaaatctactcatcaagcaaatcagtgatttccttgtggataagaggtacctcatcgtaattgatgatatatggaaaggagaagtatggagatctgtaaattgtgctttctataaaaacaaattccatagtcgggtaatcacaacaacccgtaatgtgagtgtgtgtgaagcatgtctttcttctggcgatgacataattcacaaaatgaaacccctatctgatgaagactcgcaaatactcttccatagaagaatatttcaaagtgaggagaaatgcccagaagatttgcaggtagtatcaagagaaatcttgaagaaatgtggcggcgtaccattagccatcattacaatagctagtctcctggctagtaatcaacgggtaaagcaaaaagatgagtggatgcatttgcacaatttgattggccatggagttacacagggcgaggatattgtgaaggacatgaagaggatattatcactcagctattatgacttgccatctcatctgaagccttgtttattatatctaagcatctttcctgaagactttgagattgagagagaatggttgatatggaggtggcttgccgaaggttttatgcaacatcaaaaaaacgaaaccaacctatttgagatcggagagagctacttcaacgagcttatgaacaggagcttgatccagccagcagaactcaatgaggaaggaacggtagtaacttgctgtatgcatgatatggtgcttgatcttatctgctcactgtcaagtgaagagaattttatctccatactagataatgctgagtggcatgcacctaatctgcaaaggaaccttcgcaggttatcacttcataatatcaaggcaaagtgtcggaaccatcagtttgatagcactaggctgtcaaaagtgaggacctttgctgttttttctcccgttacttgtgattggttgccatctctctcaagcttccaatttttacgtgtgctggatcttggaaattgtggcagccgtgaaagtagctctggtatcagcctcaagtatgtttggaatttaattcacctaaggtacctagggctcaaggatgcagatgtttgccaactcccaatggacataggcaagttgcagcttttacaaacactggatataagagacactagtataaaagaattaccttcaagtgttgtacagctcagaaatttgatatgcctatgtgtcgattatcgggtgaggctgccaaaaggaatggggagcttgatgtcccttgaagtattagaacaagtaggcttatcctcgtctccacacattgtggaagagctgaggcatctgacggaggttaggacactcagtgttgactgtgctaacatggacgaggatctggttgatacattaatcaagtctctaggcaacctgcacaaattgcaaaatctgcgtattgatgatggcggcagattgctagatcggatgtgtgaatgctgggtgccccctccaaacctccgtagttttgattcatggggcggcccctattcatggttctcgcgacttccgaagtgggttaattcaatgtcgcttccccacctctccaccctggaaatagatgtggaagaactgcaaggggatgacattcagatcattgggatgctgcctgctcttcggtttctgctgctgcgtgcaagacacgtgatggaaacgttggctgtgagggccgatgcattcccatctgcgaggtgctgcacgttcatagggtttccgacggcgccgtgccttttcgcacctggagctatgccaagggttcagcgccttaagttctgggtctctgcgcggtcaatcgcgagtggtgaggtcgactgcggcatgagccacctcccttctctcgagcatgttgaggtttctctgcagcacgagagttccatccatgaagagtgtgctggcgatgacgagagtgtgacggatgacgagatggagacagccaagggttggctgaggcgcgcagcagaagcccatccaaaacgtcccaccattgaaatctat

SEQ ID NO: 156 - protein, 938 aa, Aegilops searsii
MEAAAGALSPVLRKLGELLAGEYNLEKRVKKGAQSLHTELEMMHAVLREVGKVPPHQLQEPVRIWAGKVRDLSCDMEDAVDDFLVRVGEGSGSKPTDMRSRVNKFLKKTTTLFGKGKALHQICDAIKEAQDLAKELPELRKKYELDMRSASNCATVDPCVLALHKDAGELVAVDRTRDELIKTLNCEDGGPKEQLKTISIVGVGGLGKTTLAKAVYEKIKSQFDCAAFVPVGQNPDIKKLFKDLLFGLDNEKFSDIHNTARDENLLIKQISDFLVDKRYLIVIDDIWKGEVWRSVNCAFYKNKFHSRVITTTRNVSVCEACLSSGDDIIHKMKPLSDEDSQILFHRRIFQSEEKCPEDLQVVSREILKKCGGVPLAIITIASLLASNQRVKQKDEWMHLHNLIGHGVTQGEDIVKDMKRILSLSYYDLPSHLKPCLLYLSIFPEDFEIEREWLIWRWLAEGFMQHQKNETNLFEIGESYFNELMNRSLIQPAELNEEGTVVTCCMHDMVLDLICSLSSEENFISILDNAEWHAPNLQRNLRRLSLHNIKAKCRNHQFDSTRLSKVRTFAVFSPVTCDWLPSLSSFQFLRVLDLGNCGSRESSSGISLKYVWNLIHLRYLGLKDADVCQLPMDIGKLQLLQTLDIRDTSIKELPSSVVQLRNLICLCVDYRVRLPKGMGSLMSLEVLEQVGLSSSPHIVEELRHLTEVRTLSVDCANMDEDLVDTLIKSLGNLHKLQNLRIDDGGRLLDRMCECWVPPPNLRSFDSWGGPYSWFSRLPKWVNSMSLPHLSTLEIDVEELQGDDIQIIGMLPALRFLLLRARHVMETLAVRADAFPSARCCTFIGFPTAPCLFAPGAMPRVQRLKFWVSARSIASGEVDCGMSHLPSLEHVEVSLQHESSIHEECAGDDESVTDDEMETAKGWLRRAAEAHPKRPTIEIY

SEQ ID NO: 157 - DNA, 2754 bp, Aegilops sharonensis
  CDS (1)..(2754)
atggaggcagctctggtgagtgcagcaacaggggccctgaaacccgtgctggagaagctggccgctctgctcggcgacaagtgccggcgtttcaaggaggtgcgcgacgagatcaaattcctcaccgacgagctcgcggccatgcacagtttcctcctcaagatgtcggaggtggaggatcctgctgttcaggacaaggcatggatgaatgaggtgcgggagctgtcctacgacatcgaggacaacctcgatgacttcgtggcgcgtgtcgacgacgacagatctgccaagccagatggcttcatggagaagatcaagtacctcttggacaggaccaaggctcgccatgggatcgccaaggccatacaaggtttgaagaaacaagtcgttgtggtggggaagagacacgcaaggtacgccactggcgaggccatctccaagcctagcaatgccatggttgatcctagagctcttgctatctttaaggatgtatccaagctcgtcggcatcggtggaccaaaggacaagattatccaactattggccaaaccaacgcagcaacaaccaagggtggtctccattgttggatttggaggtctaggcaagacaactcttgcaaaccaagtgtataaagagcttgtcgggcaatttgattgccatgctttcttatcagtgtcacgcaatccagacatgatgaaagttttgagaactattctaagccaagtgaccaggaaagattatgttaatacagaagccggggatgaacaacaacttatcactgagatctcctgtttcctccttgacaaaaggtactttgtggtggtcgatgatatatggaacatcgatgaatggaatgttatcaagtgtgcattccccatcacctctcttggcagcagaataatcaccactactcgtaataatgatgtcgctcaatcttgtagttcatcaatcaaggaaaatatatatgaaataaagcctcttaatgtgatgcattcaagacagctttttcacatcaggcttttcaactccgaagaagattgtccttcacaccttaaagaagtttctgatcaaatattggaaaaatgtggaggcttacctctggcaattatagctatatctggtttgttggctaacaccgaaagtacaaatgatcaatgggacagagtgaaaaattcaattggttgtgcactagaaagaaatcctagcattgaaggaatgataaagatattgtctcttagttactttgatcttcctcctcatcttaaaacatgtctactctacttgagtatattcccagaagatcaggtcattaagaggaaagctctgataaggagatggatttctgaaggatttattcgtaaagaagacagatacactttgcatgagttaggagagaggtgttttaatgagctcataaataggagcttgattcaacctgctgcaagaaatacatatgataaggtggtgagttgccgagttcatgacacagttcttgatttcatcatatccaagtcaattgaagagaacttcgttactttagttggtgttcctaacgtaagtacagggatgcaaagcaaagttcggcgcctctctcttcaagctaaagatgaaggaaatttcatcctgccggcaaacctggtgttgtctcatgtccggtcacttaatgtgtttgggaatacagtgaaaatcccttccatgacagagttcaggcatttacgggttctcgactttgggggttgccgccaattggaaaaccaacatctggtcaatatagggaggttgtttcagttaaggtacttgaacctcagacaacttggggtaagtgaacttccagaacaaatcaagcatctgcaatgccttgagatgctggacctgagagacaccaatgtaagtgaattaccaacagcgattgttactctcggtagcttggtgcatctacttgttgacaattgtgtcacatttcctgatggagtttcgaagatgcaagcattggagatgttgaaacgggtcagggccttcaagcagtcatctaactttctccgagaacttgggcagctgaagaatctgaggaagatatatcttgatctgtttgatgttcctgtagctggggttaccaaggagtgctgcaagaattccactgcctatcaatctctccgcaacctaggcacacaaaacctccgttctgtaacgatctggaatggcggcagcttcttacagcaaccatggtgcccgactccgcttggcctcaagaagctcatgacctggcgttcagcagttcctcaggttccaggctgggtgggttccctggtcaacctgcaaaagttacgccttgaagtggagagtcttgggccggaagatctgtgcatacttggaagcttacccgctcttctcactctggatctcgaggaaacaacaaagtcatcgaaaggcaagctcagtgtcagtggaggacacgggttccgatgcctgaggaattttcgttataatatgatgctaatgtttacaaaaggatgcatgcccaggctggaaaggatcaatatttatctcagcatagctaatacagagtctctctccggcgttgacacctacgatttcggtgttgagaacctcccctgcctcatctctgttgagtgcagagtgagtggcaccaccagcgctgaaggtcttgaggctgcaaaggctgccatggagagagcagctatgacaaatcccaaccatcctaacctacaccttctgaatttccatgttgggtgc

SEQ ID NO: 158 - protein, 918 aa, Aegilops sharonensis; identical to SEQ ID NO: 136

SEQ ID NO: 159 - DNA, 3192 bp, Aegilops sharonensis
  CDS (1)..(3192)
atggccgagcttgccatcgggttagcacacggcgcggtagactcgctactgggacgcctcaccaggctcattgaagacgaggcaaggctgctgagcggcgtccacagcaacgtccagtacatcaaggacgagatggagagtgtttatggattcctcctcaacttcgttgatggcgactgcacggacccgcaaatggaggtgtggacgaagcaggttagggaagtcgcccgtgagtgccaaaactgcgtcgacatctacgttcacaaacaaggtcctgctgccggtaaatttaaaataggagattttatccgtacaatgatgcaccagttacctcctctgtcagaaactcccctcaggatgctgccgaaccgacacaggctcgccacaaaaatcaaggagctcaaagcaagggctcaagaggtgagcgaaaggcgcgttaggtacggcatccgcgatcctactgctcggatgaggagggaaaatcaacttcaggaagttggggaggacaccaacgggaaggaagaccccaggagcctgcatttgttatgcgaagaagatgagtgcccagctgagatttttgagggtgatatgaagattctggtatcttggttaattgagcaagagacacaaacggatatgttggtggcaaagaaatggattgggccagaagatgagatgccatcacaggaaattcccgtgggggagtggacagagagcaaggccgactcagtttcagatgcgggaacgtcttggcaggggaggagcaagaggaggccgggtgtggcaacagtggcctcaaagagattgatgttgcgctcgatgtccaggaggaagatcctaggcctcaaagagcagccggctcagctagaagacaagatgcggcagcaggattttcagctggggtgtattacagggtcaagagacaagatgccacggcaggattttcagctggggtgtatcacgggttcaagagacaagatgccacgcaaggattttcagctggggtttatcacagggtcaagagacaagaaattaggtcccaaggtcatctcaattgtgcaatcaggtgatgccaatctgaattatgcaagggaagtgtatgaagacagccagataaaggacttcttcgatttcagatgttgggtgacggtcggggagactcatgccaaatgggtattcgacgacataatcaaagccatctcatctcagcagatggatttgaaagattggcaggaaaccaagtatttaattgttcttgatgacgtccatgatgaatccctctgccgccgaatcatatctgcatttcctcctactgctgctggtggtcattctgcagttctagtgatcgctcactcatatgctctagcccgttcctgctctccaaataaagtcttcccgcctctggagcctcttgtcaagttcttctttggcaaagcgggttgccttgttgagaataatcccaaaaatgacaccctgaagcaagtcatttggtccattttatcaaaatgtgcacccgatctcttatgcctcaaggcattcttacatgttctctatgtcaatcctatgaggaacagagaagagcttcagagcctctgcaatgacctaactagtgactctcctggcaatattcggcacatcttaatgttctggtacaacaacctccctctccattacaagaactgtttgatctatctatctatcttcccccagaatgatggcgatcatatcaaaagaacaagcctagtcaggcgatgggcagctgagaacctgatcaccggaagaaatgggtcagctgcacaggatgaagctgaacactgcttcaatgtgcttcttgcgaaaagatttcttcttcacacgggcactggtgctgcagggaaggtcaagagctgcagggtaaacagtttgatatcaaagttcatcggcgatattgccagggaggagaagtttgtggatgcagatctccagccagatttcggtcatcggatatccattcataatagaagccaactgcaacaagtcttagggacacttcaggcatctcctcgccccagctcctgttggaacattcgcaagcactcaactgatactgaagatggtcaaaccttggatgaccttaccaagttccttgaaaggctgccctcatttgctggtctggggttgcttagagtgctggatctcgaaggctttgatggtttgaaggattaccatgtggacaacatctgcgagatatttcagctaagatatctgaaccttcggaggactaagattaccaaattacccaagaagatagagtatcttcaacagttggaaacactggacattcgggaaacagctgtaagatcatttgctacaaaagctgtagtgcttccaatgctaaagcatatgctagctgggaacactcaagacccaaacgaagacatagagtccttttccacagtgtgcatgcctagtgaaattgataaggcgacaaatctgcagatactgtgccatgttgatgtttctggcaaggaagatcagctggttgagattgggaagctactggagcttagaaagttaggtgttgtattcagaggcaacagaaataatttcaagcacttgctccaggcaattgagaagctgaacaagagcctcctatctctctccctccgtgcagaaacaacagaaggccacgagattacagacattaacacagcagagcctacaggattcgcacctccaaagcatcttcagagcctaaacctgtgtggcatcaggggaggattgcctcgttggatcaaggagctccacaaacttgtaaagttaactttgcgcgacactcatttgggagaagaagacatggtaccccttggcgagctcagtgggttacgctgtctcaggctccggcacaagtcgtatgtccaaaccaagttgacccttcagaaaggagcattcaaaagtcttgagtttattctgatagaaggatcagacattactgacatcagcttccatgagacccccaagattgagaagattgtttggaacttcagagagatgaaatcaattcatggaatcaaccgccttccacgcctgaaccgtcttgagctcattggcaactgcgacctgactgctatcaaagaagcactttctggacacccaaaccgacctgccgtaactcacactggacaggaaatacacggtgcggaagaagatgag

SEQ ID NO: 160 - protein, 1064 aa, Aegilops sharonensis
MAELAIGLAHGAVDSLLGRLTRLIEDEARLLSGVHSNVQYIKDEMESVYGFLLNFVDGDCTDPQMEVWTKQVREVARECQNCVDIYVHKQGPAAGKFKIGDFIRTMMHQLPPLSETPLRMLPNRHRLATKIKELKARAQEVSERRVRYGIRDPTARMRRENQLQEVGEDTNGKEDPRSLHLLCEEDECPAEIFEGDMKILVSWLIEQETQTDMLVAKKWIGPEDEMPSQEIPVGEWTESKADSVSDAGTSWQGRSKRRPGVATVASKRLMLRSMSRRKILGLKEQPAQLEDKMRQQDFQLGCITGSRDKMPRQDFQLGCITGSRDKMPRKDFQLGFITGSRDKKLGPKVISIVQSGDANLNYAREVYEDSQIKDFFDFRCWVTVGETHAKWVFDDIIKAISSQQMDLKDWQETKYLIVLDDVHDESLCRRIISAFPPTAAGGHSAVLVIAHSYALARSCSPNKVFPPLEPLVKFFFGKAGCLVENNPKNDTLKQVIWSILSKCAPDLLCLKAFLHVLYVNPMRNREELQSLCNDLTSDSPGNIRHILMFWYNNLPLHYKNCLIYLSIFPQNDGDHIKRTSLVRRWAAENLITGRNGSAAQDEAEHCFNVLLAKRFLLHTGTGAAGKVKSCRVNSLISKFIGDIAREEKFVDADLQPDFGHRISIHNRSQLQQVLGTLQASPRPSSCWNIRKHSTDTEDGQTLDDLTKFLERLPSFAGLGLLRVLDLEGFDGLKDYHVDNICEIFQLRYLNLRRTKITKLPKKIEYLQQLETLDIRETAVRSFATKAVVLPMLKHMLAGNTQDPNEDIESFSTVCMPSEIDKATNLQILCHVDVSGKEDQLVEIGKLLELRKLGVVFRGNRNNFKHLLQAIEKLNKSLLSLSLRAETTEGHEITDINTAEPTGFAPPKHLQSLNLCGIRGGLPRWIKELHKLVKLTLRDTHLGEEDMVPLGELSGLRCLRLRHKSYVQTKLTLQKGAFKSLEFILIEGSDITDISFHETPKIEKIVWNFREMKSIHGINRLPRLNRLELIGNCDLTAIKEALSGHPNRPAVTHTGQEIHGAEEDE

SEQ ID NO: 161 - DNA, 3156 bp, Cynosurus cristatus
  CDS (1)..(3156)
atggatcaggagcagcagcgtctcatcaatgttatcatggcactagtggactcgatggagccccttccggggatgatctccgatctgctgcggcgtgagccgcatggcgggcggcgcaccaccgcctccgttgaccgcacgctgcggagctggaagttcatcgagctcgaactgagaagccttatcgcgtccttgacaaaactgcaagagctattgccggatctgagacctgattttatcaacccatacagatcaatagatggttggtccacactgttctttcagttggtcaataaagtccatgaccagctcactggagctgatcaacctagcctaggtggatgtcaagcccggctgcacggagccgccacgcgcttcttctgccgtgatgcaaggcggttgctatcggatagcactggagatgatatgcaggaaatcttgacaagcctacataaggccgccgaatcaccctggaggtacacgcatctcatgctgcccggtgatggcgagcgtacatccagctctgccgcgcagctgccgcacccgtacgcggatgatggtggtgcctctcttgttggcatcgaaggcgccctaacaagtaagcacctcaagtggttcatggcagccgaccgggaagctgacagcaaagctctcaaagttatggccatggttggacccgctggggttgggaagacaacactctccatggaggtttaccggcaactccaacaaaccggagactttcagggttgcgctacggccaaggtgtcccggaatcctgatttcaaacaacttctcaaccacatcctctcgcaaatcgacagacctgaggcatctcacagcacctcccagccccagtttattgcttacaaaataaagcagtgccttcaaggaaaaaggtaccttgtcgccattcatgatttatggagaaaatcagactgggatattatcaagaatgcttttcccgagaataacctaggcagtcggataatgataacaacacagctcagaagcacaggtcacttgtgttgctcccattgtgatcatgggcttgtgtacgatgttaagcctttgggtgcgctagattcaaaaaggcttcttttcaaacaagctttcggctccgaagatgcttgtccaacagaaaatttaaagcaagcatgtgaagaaattttgaggagatgtgaaggtataccattattcattatcggtatggctaactggatgcatgaacaggttcagaaggcgcagccttccaagaaaagttcagatgccaaaaataagcgggaagtgcataacatctctaccaactatagcatggatacagtccccaaactgctaaagcagtttgaactggtactggctactatttatgatgatcttccgtacgatttgaaggcggtgttggtgtatatgagcgtctttcctgaaggctatatatttgataaggatactctaatcgagaaatgggtcaaccaagggatgatcggggaagatttactggatgacagtgtagaaatagcacagtattatctgtgcgggctcatagacaggaacgtcttcaccccagtagcagcaagtagcagaaaccatcttcaactggaggaagccggctgccagtggcatgtcgggtatttcatgctgcagttccttgcctccaaatcagctcagttccttgcctgcaaatcagctcatgaccatggatttgtttgtaccagtcgcacgctcgagctccactccgtacaagcagcaggaggcaagaccgcattacggcggctgtccctccaccagcctcatcaggatcttccaacccagctggaggaaatggatttatctcagacccgtctgctatgtgtttctggtgaagtgagccaagtctctcttaaaaggtttggcaatttggtagtgttggacctcgaaggttggcagcacttcaacgagaaggaggacatgttgcttatatgcaagatgtacttgcttcggtatctgagcctgaggaacgtcaaagggctcagcaagctcccacccgagatcaaggagttgcagttccttgtgtgtctggacataagccaaacgagcatatgtgagctcccgtcgcaactgggtgagctacactggctgaagaagctggatatcagaagcaccaaagtaaggcagctgccgaagaagttgttcgagtacagaaggttgcaatgtctgcttgttggtggcgatggagctactcgtgacgagacagtaacagaaataccggaagaggtgagatggctcggaaggctaagcacactagcaactgttgatttaacccgaggctctccagagcttgtggatgctgtcggtagtgtgcaggagactctggcggtaaaatggtcttttcgccagtgcaccgaccgaagattccagaaagccacacatggctgggattgcttcacgtctctgacaatttactgtggactgggctgttgcatggactttctagattttccgcctgatgaatatgaccagtttaagaaatttaagatggtagatggaaggtttaccggccttcccaaatggttcagtgggctccgttttcttacttacatagaaatcacggtctgcacgctactgccagccgatgtaagtgtgctcggagatttgtcattggagtgccttgtgctagggctgcactttattccggaagctgcggtagtaattgagggtgagcggttgttcagttgccttcggagattctccgtcagctgccgggttccatggctgacttttcgccaaggagttatgccagccctcacatttcttgagctgaaaatcgccgggagcccggcgagtcaggagagcattccttcaggtatcagtaacctcaggcgcctgtcggatgttttcatccaataccatgaaaattacgtcaacagcaccagtgtcaagatgacggtcgaggccgtgaagaatggaattgccgagcatcctatgccgatcaacctattcatcaacggcatcgaagaccaagaggaggatgcccaggaagctggagtagctcaggttctggtgaccgcgagcgcaagtcagtgcgagattcagactgaagagaacagcacccgagaccaggaggaaaatacccagaaagctgaagagggtgcagtgagtgagattgaatctgcagag

SEQ ID NO: 162 - protein, 1052 aa, Cynosurus cristatus
MDQEQQRLINVIMALVDSMEPLPGMISDLLRREPHGGRRTTASVDRTLRSWKFIELELRSLIASLTKLQELLPDLRPDFINPYRSIDGWSTLFFQLVNKVHDQLTGADQPSLGGCQARLHGAATRFFCRDARRLLSDSTGDDMQEILTSLHKAAESPWRYTHLMLPGDGERTSSSAAQLPHPYADDGGASLVGIEGALTSKHLKWFMAADREADSKALKVMAMVGPAGVGKTTLSMEVYRQLQQTGDFQGCATAKVSRNPDFKQLLNHILSQIDRPEASHSTSQPQFIAYKIKQCLQGKRYLVAIHDLWRKSDWDIIKNAFPENNLGSRIMITTQLRSTGHLCCSHCDHGLVYDVKPLGALDSKRLLFKQAFGSEDACPTENLKQACEEILRRCEGIPLFIIGMANWMHEQVQKAQPSKKSSDAKNKREVHNISTNYSMDTVPKLLKQFELVLATIYDDLPYDLKAVLVYMSVFPEGYIFDKDTLIEKWVNQGMIGEDLLDDSVEIAQYYLCGLIDRNVFTPVAASSRNHLQLEEAGCQWHVGYFMLQFLASKSAQFLACKSAHDHGFVCTSRTLELHSVQAAGGKTALRRLSLHQPHQDLPTQLEEMDLSQTRLLCVSGEVSQVSLKRFGNLVVLDLEGWQHFNEKEDMLLICKMYLLRYLSLRNVKGLSKLPPEIKELQFLVCLDISQTSICELPSQLGELHWLKKLDIRSTKVRQLPKKLFEYRRLQCLLVGGDGATRDETVTEIPEEVRWLGRLSTLATVDLTRGSPELVDAVGSVQETLAVKWSFRQCTDRRFQKATHGWDCFTSLTIYCGLGCCMDFLDFPPDEYDQFKKFKMVDGRFTGLPKWFSGLRFLTYIEITVCTLLPADVSVLGDLSLECLVLGLHFIPEAAVVIEGERLFSCLRRFSVSCRVPWLTFRQGVMPALTFLELKIAGSPASQESIPSGISNLRRLSDVFIQYHENYVNSTSVKMTVEAVKNGIAEHPMPINLFINGIEDQEEDAQEAGVAQVLVTASASQCEIQTEENSTRDQEENTQKAEEGAVSEIESAE

SEQ ID NO: 163 - DNA, 2553 bp, Holcus lanatus
  CDS (1)..(2553)
atggcgcacgagcgggtcgtcggtatccccatccccgccgccaccgtctgccaggaatccgccgcgtcctcggcgtcgcgtcgcgtggcgcgcaaccccgtgggaatcgggaggcccgtggaggagctcctctcgctgctggacgaggtggagggcgagcccgagcagctgagggtgatctccgtggtgggcttcggcggcctggggaagaccaccctcgcgagggcggtctacgacagccctcacgccgcggagaaattccactgccgtgcttgggtcaccgccggccgctcgccggagaccaacggcgacgggatcagtgagatcctacgtgatgtactccggcaatttcgtcccaaagacgccatggatgttgctgttgatggccaacgtcttgaagccctgctcactgaatacctcaaggatacgagatacttcattgtcatagatgacatcgccatggagcaatggagcactataaattccatctttggagacaatggcaaaagcagcagaatcttactgaccacgactattcagtcaacagctaatatctgcagccatggcaacggctatgtgtaccaactgaacacacttggtgaagaggactccaaggagatagctcttgggttacgatcgcctgagctggagcagggttcgacgacgctgctgcagaaatgtggtggtcttccacttgctcttgtcagtgtctccgatttccttaaaagttcagttgagcctacaggggagttatgcgcagagctatgtcgcaacctgggttctcatctgagagagatgcatgggcatgacaccttcgcagaactaagaaaggtgttgatgcataactgtgacagtttgtctgttcatgctatgacctgcttgctatatcttggtgtattcccaaacaatcgtcccctcaagaggaaagttgtaatcaggcggtggttagctgaaggatatgcgcgaagcgattctcttcgcagcgaagaggacatcgcagatgagactttcaaggcgcttattgatcggaatatcatccagtcaattgacacaagaaacaatgcgcaagtcaagacttgcagggctcatggtatcatgcacgagtttgtgctgcacaagtctgtgtcgcaggggttcatcgcgacatcgtctcgtgaccatccaagaccctgtgcctatgttaatagtgctcgccacctttctatccatggtggcagtgtgacagatagtaagccatctgacgaggatttatcttgtgttcggtctctgacagtctatgggaaagcagccgatgctatttcatattttcctaggtgcaaactgttacgagtcctggatctggaggaatgcaatgatctagaagacagtcacctcaaacacataggcaagctatggcatctgaaatatctaagtgttgggggaaccattgagaaacttccgagcagcatcgaaggactgcattgcttagagaccctggatttaaggagaagcaagataaagacattgccagttgaggccattatgctctaccacttagcccatctgttcggaaagtttacgatagacaatgatgacctgaagaatgcaaacaagatgagcaaagtaatgaagttcttgtctggaaataagagtaacctgaagaccttagctggatttgtcaccagcgagagacaagggtttctgcaacttattggtcatatgaaggatctgagaaaagtcaagatatggtgtcagccagctgcaaatggtagtaactatgccactgatctttccaaggccattcagaaattcactaaggttcccatggacagtacaggtgctcgttctatatcacttgattcagaagagttatctgaagacttgctgagttcgcttgattttgagccatgccccgaaggttccaaatatgatataaggtcgctgaagctacatggcaagctactccagttacctccatttgttaccttgctgacaggtctcactgaactgtctattacatcagctactcttacacgtgatcttctatcttctctgatcaatttgggcaacctgctttacctaaagctgatcgcagatcagcttgagaattttgaaatgagaaaaggggcattcccaagtctgcgacgtctgtgctttgtagtgcgaagtcttgcttcacctctgccagtaatcgaaaatggagctcttccaaaccttgtctcactgcaacttctctgccccggtctagttggtctttctggcatccaaattagatacctcagacatcttaaggaggtcacgattgaacatgcagtggctgaccaaacaaaacatgattgggaacaagcaacaaagaaccaccggaataggccaagactcttgttgttcaaaagcggtgatccaatggaaagcgagggaccagggcatgaagaagcttctgccgtgagagaaaaacggaaaatatgcttagtgcaaccatgttccgatttagattctggtctcaagaagatgcggctttcagagtcttcttcacagcttcaagtgatcgtccattctaattcctctatgcagtta

SEQ ID NO: 164 - protein, 851 aa, Holcus lanatus
MAHERVVGIPIPAATVCQESAASSASRRVARNPVGIGRPVEELLSLLDEVEGEPEQLRVISVVGFGGLGKTTLARAVYDSPHAAEKFHCRAWVTAGRSPETNGDGISEILRDVLRQFRPKDAMDVAVDGQRLEALLTEYLKDTRYFIVIDDIAMEQWSTINSIFGDNGKSSRILLTTTIQSTANICSHGNGYVYQLNTLGEEDSKEIALGLRSPELEQGSTTLLQKCGGLPLALVSVSDFLKSSVEPTGELCAELCRNLGSHLREMHGHDTFAELRKVLMHNCDSLSVHAMTCLLYLGVFPNNRPLKRKVVIRRWLAEGYARSDSLRSEEDIADETFKALIDRNIIQSIDTRNNAQVKTCRAHGIMHEFVLHKSVSQGFIATSSRDHPRPCAYVNSARHLSIHGGSVTDSKPSDEDLSCVRSLTVYGKAADAISYFPRCKLLRVLDLEECNDLEDSHLKHIGKLWHLKYLSVGGTIEKLPSSIEGLHCLETLDLRRSKIKTLPVEAIMLYHLAHLFGKFTIDNDDLKNANKMSKVMKFLSGNKSNLKTLAGFVTSERQGFLQLIGHMKDLRKVKIWCQPAANGSNYATDLSKAIQKFTKVPMDSTGARSISLDSEELSEDLLSSLDFEPCPEGSKYDIRSLKLHGKLLQLPPFVTLLTGLTELSITSATLTRDLLSSLINLGNLLYLKLIADQLENFEMRKGAFPSLRRLCFVVRSLASPLPVIENGALPNLVSLQLLCPGLVGLSGIQIRYLRHLKEVTIEHAVADQTKHDWEQATKNHRNRPRLLLFKSGDPMESEGPGHEEASAVREKRKICLVQPCSDLDSGLKKMRLSESSSQLQVIVHSNSSMQL

SEQ ID NO: 165 - DNA, 2763 bp, Aegilops sharonensis
  CDS (1)..(2763)
atggcggagatgatcgcgatatcgctctcggcgaaggtcgccgcaacgctctcgcgcagtccggccgccgacatctcctctctcgtcgccgtccgctcgggcatctccgccgcggcacgggacctggagctcctccgcgcgttcctccggttcgccgactcccgccgcggcgcggacgcgctcgcctccgcctgggtggaccagatccgggacgtcggcttcgagctggaggacgccgcggacgagtacgccttcctctctggcggcggcttcgtccgcgcctgcgctaacttcggcgcgtggctcgctctggccagacggctaggcaaggcgcgggtgaggctccgcgacctgtcagacgccaaggagcggtacggcatccagccggccgaggcctccgcgtccaactccgctaccgacggcggcaccgggcccgtcgtaggccggaagctagcggaagcagcgcatttcttgcaggatggggagatcgtcggcttcgcggcgcacagaaggtcactgatgaaatggctcacggaggaccttgactctcggaggtcgctggtcgccgtgtgtggaatgggcggcgttggcaagaccactctggtcaccagcgtgtacaaggaagtcgccgcaagccgccacttcgactgtgctgcgtgggtgtccgtctccaagaacttcacgacggatgacctcctaaggaaaattgccaaagaactgcaccgggacgcccgtgccggcatgccagacattgacgagatggactaccggtcgctggtggaagctttgcgtgggcatctcgccaagaagaggtacttgttattgctggatgatgtctgggatgccgatgcgtggtatgaaatacgcaatgcattggttgatgatggaaaagggagcaggataatcatcacaacacggagtcaagatgttgcctctctggcagcatccaccaggatcatcttgttggaaccgctccctcagcaagaagcatggtccttgttttgtaacaccacattcagggaagatgccaaccgggagtgcccgcatcatctggagcattgggcttccaagatactgggcagatgttgtggtctaccattagcaattgtgtcagttggtaacctccttgcattgaaaaatagaatcgaatttgcttggaagaatgtccatgacagccttgattggaatggaagcaatgtccgtggaattgggcaagtgtcaagcatactgaatttgagcattgacgatctgccttatcacctgaagagatgtttcatgtattgcagtatataccctgaagatttcttaatcaaaaggaaaatcctgatcaggttgtggattgcagaaggctatattgaggaaaagggccagggcacaatggaggagactgcggatgattacctgaaccagctagtgcaacgtagcctgttgcaggtcaagttaaagaatgagtttggacgagcaaaacggttctgcattcatgacctgatcagggatttgattctgcaaaggtcaacaaaagaagggttgacagtattctcaaagtgttccccagcgttggtgtcaagcaaaaaagttcgtcatcttatacttgaccgatgcgtaaattatcatctaccggttccaaagatggcattgcttcgctccttcaacgcatttaaggcagatatggattcctcagtcttgtctggctttaggttattaaccgtattaaacttatggttcgttcagatagataaactacctagttcattgaccaatcttcttaatttgcggtatcttggcatccgttccactctcattgaagagcttccacaggatttggggaaattacatcacttgcaaactttagacgccaagtggtccagggtccagagactaccacctagcataacaaagctcaagagcctgcgccacctgatagtgtttagacgccgacctgcagattttaggtaccctgggcctggtacagcaattgtatttccagaggggctgcaaaatctaacctgcctgcagacccttaaatacattgaagctgatgagaacatggtcaagtccttaggaagcttgaaacatatgaagagcttagagctatttggtatgcatgagagcattcttgttcatttgccctcatccatctccaaaatgagcagccttctgcgtttggggattgtcagccgagatgctaatgtatcattggacctagagccattttatccaccaccaataaagctacagaaactttcattgacagggatgttaacgcgaggtaagttgccttcatggtttggccaccttgataacctcgtgcagttgcagttatgttcatctgagctcaagagagattcaattggattgctctcatcgcttcccaggctgttacatcttaccctaaagaatgcatacaatgacaagagcttgacctttccggaaggctgttttccagttcttaagaagctgagcttacatgagttgcctaaactttgtcacgtagagtttcaaaaggggagtcttgtacatcttaatgtgctaatcctaggccgttgtgatgagctaactgaaaaaggcatcgagaacctcacagagctcgacaacctggagctttttgaaatgccaagtgagataatacaaaagattcaaggtgcggaagtaaagaggaataatgaagattctcggcgtactacaactgttaagaacacctgctggtataatggacaattcttgcagaaaacaatttacaccgacctattcactattcaaatg

SEQ ID NO: 166 - protein, 921 aa, Aegilops sharonensis
MAEMIAISLSAKVAATLSRSPAADISSLVAVRSGISAAARDLELLRAFLRFADSRRGADALASAWVDQIRDVGFELEDAADEYAFLSGGGFVRACANFGAWLALARRLGKARVRLRDLSDAKERYGIQPAEASASNSATDGGTGPVVGRKLAEAAHFLQDGEIVGFAAHRRSLMKWLTEDLDSRRSLVAVCGMGGVGKTTLVTSVYKEVAASRHFDCAAWVSVSKNFTTDDLLRKIAKELHRDARAGMPDIDEMDYRSLVEALRGHLAKKRYLLLLDDVWDADAWYEIRNALVDDGKGSRIIITTRSQDVASLAASTRIILLEPLPQQEAWSLFCNTTFREDANRECPHHLEHWASKILGRCCGLPLAIVSVGNLLALKNRIEFAWKNVHDSLDWNGSNVRGIGQVSSILNLSIDDLPYHLKRCFMYCSIYPEDFLIKRKILIRLWIAEGYIEEKGQGTMEETADDYLNQLVQRSLLQVKLKNEFGRAKRFCIHDLIRDLILQRSTKEGLTVFSKCSPALVSSKKVRHLILDRCVNYHLPVPKMALLRSFNAFKADMDSSVLSGFRLLTVLNLWFVQIDKLPSSLTNLLNLRYLGIRSTLIEELPQDLGKLHHLQTLDAKWSRVQRLPPSITKLKSLRHLIVFRRRPADFRYPGPGTAIVFPEGLQNLTCLQTLKYIEADENMVKSLGSLKHMKSLELFGMHESILVHLPSSISKMSSLLRLGIVSRDANVSLDLEPFYPPPIKLQKLSLTGMLTRGKLPSWFGHLDNLVQLQLCSSELKRDSIGLLSSLPRLLHLTLKNAYNDKSLTFPEGCFPVLKKLSLHELPKLCHVEFQKGSLVHLNVLILGRCDELTEKGIENLTELDNLELFEMPSEIIQKIQGAEVKRNNEDSRRTTTVKNTCWYNGQFLQKTIYTDLFTIQM

SEQ ID NO: 167 - DNA, 3147 bp, Aegilops bicornis
  CDS (1)..(3147)
atggcgatggaggcggcgataatcggcgcgttgctgaagaccacgctgccgaaggccgtctcggtgctgggcgggagcagggatgtcggatccatccagttggagctcagttacatcgaggccaccatccgagaccaccgcaagaagaccggcggcaaggacacgagccacctgcgggaggcgtggatccacgacctgacgcgcttcgcgttcgacatcgaggactgcgtcgaccgcttcctgcagcaggtgtcggaggacggcgaggcgggcttcctccgccgctccgttcgctccgccaagaacaccgtgtacactcgcacggtgttctcccccaagatccgcaagctcaagaccagatccgaggagatacaccgccggctcaagcgctacatcgaggaggagacgacgggggcggcagtgacacccgacggcgcggcgtcgatccccaccgcaggcgcgcacgcatggtccggtgctccggcggcggcggtggggatggacgagcccctcggggagcttcttgagctcgtccgggagcctgggacgccgtcagaggggaagctcaaggtgatctccgtcgtcggcttccatggcctcggcaagactcttcttgcccaccaagtgttcgatcacggcgatgtgcgcgaacagttccctctgcgagtttgggtttgcgcggcgggcaagggcaagccggtggttctcaaggagatgctcgataaagtgctccagaatggtgccggtacctccaccgacagcgcccggcaagctgactctgctcctgccggcacacgcggcgcgacgactacctccaacgccaacagcctcgtctcacaggttgaggagaatggtgttgagcaagtccagactggtgagaggaccgcagccggtggcgtccatggtgtcggacccgtcggtacatggcgccagtgcatccaagcagtttggtgggctctggcgacaatgctggtgtacatcttgtccccggcgttcaccgtggcaaacatggtgcgagcctcttctctccaagttgagtctgcagacatacgtagtgctactgtgaatgcaagtatctccaccagcaccgtcacactagttgatgagaacaagagtgtccagatgaagaggcaagctggcaggggcaaggctattcaggaggacactcacgaggacggtgtagatgatacgacgatcatcgaacaacgtctacgatcatacctgaagaatcaaaggtatttgattgtaattgatggcatgcaaacagaagagttgtgcaacataacatctgtattccctgtggataacggagtggacagcagagttattgtgacgacaaccattaagaaaatagcaagacgctgcagctctgccaatggtcgtgtgtacaaaatgaaaacacttgacgacaatgattcaagaaagctgttcttcgaagtattttccaagggtaaatattcagatgcagatgcaacggagttgaaagcatctgccctcctggagaaatgtggcggcctaccgcttgcccttgaaagcaaagcaaagtttctgaagagtgaagaagacctgaccaagagtaaatgtgaagatgcctgccgcaagctttgtgctccagaagggtgtgacgacacattgggaagaatgcatggggttcttgtcagcagctatgagagtctatgtagccttgttctccagcagtgcttgctatatttctgtatgttcccgcgtggccaccgtgtcaggaggaatcctctaatcaggcggtggctggcggaaggacttgtacatgtacaaccaggggatgcagtgagcaccacaccccaagacattgcaattgagaacttggagaccctgatcgaccgcagtatcattcagtccacggatgtgagcacctgtgggaacgtcaagagatgccaacctcctgggatgatgctcgagtacattgtccgcaagtccatgtctcaaaatttcatcaccttgctttgtggtaagagtgagacggctgaagaatgggactacgttcgccggctttcgctccatgattactgtgctgcaaaactgcccaagggcttatctcgtctccggaccttggcggtattccctgctggggatgctgccaaaactgaacctacattgaattttgcggagtatgacctgctgcgagtgttggatttagaagaatgtgatggtctaaatgacgggcacctccagaagatatgcaacctggtgtttctgaaatatttgagccttgggggcctcattagtgaggtcccaaagaaaattgccaggctgcaatggttagagacactcgacctgaggagaaccaagatagagaaggtgcccgtggaagtcatccagctcccccagttaaaacatctccatggaaaatttcagcttattgaaggtgactacggaaaggcaaatgcagagcacttgtctaagagaagtaccctggagacactttcaggatttgtcacaggagaaagcgaaggatttccacaggtgatgcgccacatgaagcggctgagaaaggtaaaaatatggtgcaaatccaccacaagcagaaggaacctgaaccatcttgaagaggccatcaaggtgttcattcgtaatgggaacgaatggcctcatcgctccttatccattgacttccaagaatgcccggacccattcctgggttctctggaagcccccggaagtcttgcctcgctgaagctgcggggcaatctcgggcgattccctcagttcgttacgaagctgaacagaatcgaggagctgtgtctgtcgtcgactagcctaagccagggtgttcttctatctgttggtcgcctggacacactgaagtatctgaagctcattgaagacaacatcgggcctcttgaaatacggcacgagcacttcccaagcctccggcgtatatggctcgtcggcgcacaaagcctgcatggcgtaacaaccggagctctgccgcatcttacctcgcttcatatgatatgcgaatctttaaatggacttgccggcatcgaaatcagacgcctagaaggattaaaggaagtgaggctccattctggggtcgatcaaggaacgaaggatgcatggaaggaagctgcaaggggccatcctaagaggcccgacgttctgcttcac

SEQ ID NO: 168 - protein, 1049 aa, Aegilops bicornis
MAMEAAIIGALLKTTLPKAVSVLGGSRDVGSIQLELSYIEATIRDHRKKTGGKDTSHLREAWIHDLTRFAFDIEDCVDRFLQQVSEDGEAGFLRRSVRSAKNTVYTRTVFSPKIRKLKTRSEEIHRRLKRYIEEETTGAAVTPDGAASIPTAGAHAWSGAPAAAVGMDEPLGELLELVREPGTPSEGKLKVISVVGFHGLGKTLLAHQVFDHGDVREQFPLRVWVCAAGKGKPVVLKEMLDKVLQNGAGTSTDSARQADSAPAGTRGATTTSNANSLVSQVEENGVEQVQTGERTAAGGVHGVGPVGTWRQCIQAVWWALATMLVYILSPAFTVANMVRASSLQVESADIRSATVNASISTSTVTLVDENKSVQMKRQAGRGKAIQEDTHEDGVDDTTIIEQRLRSYLKNQRYLIVIDGMQTEELCNITSVFPVDNGVDSRVIVTTTIKKIARRCSSANGRVYKMKTLDDNDSRKLFFEVFSKGKYSDADATELKASALLEKCGGLPLALESKAKFLKSEEDLTKSKCEDACRKLCAPEGCDDTLGRMHGVLVSSYESLCSLVLQQCLLYFCMFPRGHRVRRNPLIRRWLAEGLVHVQPGDAVSTTPQDIAIENLETLIDRSIIQSTDVSTCGNVKRCQPPGMMLEYIVRKSMSQNFITLLCGKSETAEEWDYVRRLSLHDYCAAKLPKGLSRLRTLAVFPAGDAAKTEPTLNFAEYDLLRVLDLEECDGLNDGHLQKICNLVFLKYLSLGGLISEVPKKIARLQWLETLDLRRTKIEKVPVEVIQLPQLKHLHGKFQLIEGDYGKANAEHLSKRSTLETLSGFVTGESEGFPQVMRHMKRLRKVKIWCKSTTSRRNLNHLEEAIKVFIRNGNEWPHRSLSIDFQECPDPFLGSLEAPGSLASLKLRGNLGRFPQFVTKLNRIEELCLSSTSLSQGVLLSVGRLDTLKYLKLIEDNIGPLEIRHEHFPSLRRIWLVGAQSLHGVTTGALPHLTSLHMICESLNGLAGIEIRRLEGLKEVRLHSGVDQGTKDAWKEAARGHPKRPDVLLH

SEQ ID NO: 169 - DNA, 2769 bp, Aegilops bicornis
  CDS (1)..(2769)
atggccgacgaggcggcgctgctgctgggcgtccggagggaggtgggcttcatccgcagcgagctgcagatgatgcagtccttcctgcgggtgcagtcctccgccacgcgctggggcgccggcgccgggggctgcagggacacggtgcggacttgcgtcaagcaggtgcgcgacctcgcctgcgacctggaggactgcctcctcgacttcaccctgcacgcctcccgctcgcgctggctgcgctggggccccggcctcgtcgcccgacaccgcctcgccggccggatccgggacctcaaggccaccgtcgtggagctcaaccagcgcaacaagcggtacaacgtcttcgccgccgccagccaccacggcgtcacgccgggggaggagcagcacgggcacgccgacgacgactacccgcgcgcccagctcgcgcccgggaacgagcggcaggacatcgagcgggccggcgaggtggacgagctggtcaagctggtgaacaaaatgggcgacgcgtgggtggtgtcggtgtggggcatgggcggcatggggaagtcgtcgctggtgaggatgctgtacaacgacatggccctcatcgacggcttcgacggccgcgcctgggtcaccgtgccgcacccgctggagagcaccgacgaggtggagcgccggctcaggaagcagctcggcgtggcgcccgaccgctccgtccgggcgtggctggaggagaaccggtgcctcgtcgtggtggacgacgtgtcgtcgcacgaggagtgggagctcatatcgcggtgcctccccgcgaacggcccgacgggcagccgggtcgtggtgacgacacggcgagacgacgttgcccggcagtgcgcgggggacgtgcgggagaacgtgtacgagctcaagcctctcgaagacgaggaggcccgaaagctgttctgtcaaaaggtttacaaggatgctggatataagttaatggatgatatgatggagcaagccaatcgtatcttagagcgatgtcggggccttccacttgctatagccaccataggaggtttattggctaacaggcccaaaacaagcagggaatggatggatttgcgaaagcatcttgggtcagagctagagtcagaccgagatatcaaaagagttatcacctcaagctatgatgggctgccatatcatctcaagtgttgcttcttatacctgagtatcttccctgagaaccacgagattaggcttacgcgcttattgcggcggtggatagcagaaggctatataacaaagccacgtgacatgagcgtcgaggagcttggacggaggtactacaatgagctcatcagtagaagtatgatccagccttcggagaaggccagggctagcatggcggttgaacgttgtcgtgttcatggcgtggtgctccaaataatattgtcccagtctattgaggagaaccaactcttcatcatggataagcactgcaatgaggctccacaaagtaacatacgccacttggtagtgacaagatggaagaaaaatgagaagatggcaagcctaaacttgtctcaggtacgctcattgacaatctttgggaggtgccctgtgtccctcatctcctccaaattgcacttgttgagagttcttgacttggaagatacacttgagctggaaaatgatgatctcaagcacatcggggagctgcaccatttgaggtaccttggtctgcgaaagacaaacatttcaagccttccttcctctctagagaacctcaggttcctagagacattagatgttcaagacacaaaggtgacacaactcccagttggtatcaccaagctggagaaattatgtcaccttgttggtggcgtcaactttgccaaagacttggcagggaagacgaagagaaacaaggaaacgggcaaatgtaatggtgacccctttgaaacgtttgcagatttggttaccgggtgctatggttacaagcaggttgagcctccatgctcatgttgcgcatgtgagtttagtgtaacagcccccgagagaattgagaagctaaggaacctacaagtgctaggggtggtgcacattgcgcgtggaagcaaggtggcaaggaacttgggggagctgactagcttgcgcagattaggagtggaagtagatgcgacagaggaagtagggaaggacttatgcagctcaatatcaaggcttgttcgtctggaacggcttgaagtgcgctctaggtcgcttgaatttctgaaggaagcaaaggaaatgccaccaaagcatctcctatcactgcgcctatgtggccgtttgggcaacctccctggctggatggatcgtctcaacgatctggccaaggtgaagctgattcagacacagttgaagcaggttgacatcgaggtgctggggaagctgcgcaaccttactcttcttgcactctgggaggagtccttcgccgagaagacgttatgttttggggaaggtacatttccgaagctcaaactgctttacattgaagggatggagaacatcgagaccatacaaatcaaggatggtgcattggccgtgctcgagaaacttgaagtgaagaaatgcgttaacttggacgacagtaaggagggcttgtcccttgtgctggtcctccaaaacctgaatgaacttgtcttgacaagttgcggcgacaaaccgaagctggagaaggaacttcaaaagcagattagtggattcaagaagcgcccaaagtttattactggcaagtccattgtatctaggacc

SEQ ID NO: 170 - protein, 923 aa, Aegilops bicornis
MADEAALLLGVRREVGFIRSELQMMQSFLRVQSSATRWGAGAGGCRDTVRTCVKQVRDLACDLEDCLLDFTLHASRSRWLRWGPGLVARHRLAGRIRDLKATVVELNQRNKRYNVFAAASHHGVTPGEEQHGHADDDYPRAQLAPGNERQDIERAGEVDELVKLVNKMGDAWVVSVWGMGGMGKSSLVRMLYNDMALIDGFDGRAWVTVPHPLESTDEVERRLRKQLGVAPDRSVRAWLEENRCLVVVDDVSSHEEWELISRCLPANGPTGSRVVVTTRRDDVARQCAGDVRENVYELKPLEDEEARKLFCQKVYKDAGYKLMDDMMEQANRILERCRGLPLAIATIGGLLANRPKTSREWMDLRKHLGSELESDRDIKRVITSSYDGLPYHLKCCFLYLSIFPENHEIRLTRLLRRWIAEGYITKPRDMSVEELGRRYYNELISRSMIQPSEKARASMAVERCRVHGVVLQIILSQSIEENQLFIMDKHCNEAPQSNIRHLVVTRWKKNEKMASLNLSQVRSLTIFGRCPVSLISSKLHLLRVLDLEDTLELENDDLKHIGELHHLRYLGLRKTNISSLPSSLENLRFLETLDVQDTKVTQLPVGITKLEKLCHLVGGVNFAKDLAGKTKRNKETGKCNGDPFETFADLVTGCYGYKQVEPPCSCCACEFSVTAPERIEKLRNLQVLGVVHIARGSKVARNLGELTSLRRLGVEVDATEEVGKDLCSSISRLVRLERLEVRSRSLEFLKEAKEMPPKHLLSLRLCGRLGNLPGWMDRLNDLAKVKLIQTQLKQVDIEVLGKLRNLTLLALWEESFAEKTLCFGEGTFPKLKLLYIEGMENIETIQIKDGALAVLEKLEVKKCVNLDDSKEGLSLVLVLQNLNELVLTSCGDKPKLEKELQKQISGFKKRPKFITGKSIVSRT

SEQ ID NO: 171 - DNA, 2832 bp, Aegilops bicornis
  CDS (1)..(2832)
atggtggtggtaggagaactaggcgttggggtttcagtcatggggtggttcctagcgcctcacatcaccaagctcatggagattgcacgggagtgcgcagcctccaagtgcatgctctacggggacagcaccgagatgctgcaaaaactggcggaggatctatatgacatcaagtggcacctccacccacacagcaccgacttcgtcaacgaccagggcaagcttgaccggctatggcggctcaaagacgacgtccaccgcgtggaggagatcttggacctgtttcagctggagatccatgacatcgagacaaccggtaattacataacaagaaataagaagcgcctgcccggcaagaaagttgagttgtcgcgtcagctggcgaaagtgctcaagaatttagacgagacccgggacagggcgcgggaactccgacatggcgcaggcccttccatgtcgccaaaagcagaaactggccagcacaccatgagggacaagaggagcttcttcgggtaccaggacgagtatgcccagctggtctctatgttgtggccgcagccggatggccacaagctggtgaaggtggacgccaaggcgcggcgggttgttatcgccatcgtcggccatgccgggatggggaagacagagcttgctcgccaggtgtttcgggacgccaaaggaaagtttgatctttgcatatgggtgcacgcctatggcaagaacaaagagttggacctcctgaaagagatctggaggtctgctgataggcccgtcggcgatatgaacgtctcaagccttcagaagaagatggaaaacctattgtcatccaagaggtgccttctggtgctcgatgatgtatggaaccatgagttggcgaccaacgaggaggagagggagcaggcatcgctggcgctcgaatcaataatgagctttgccgaaggtggaagccgaatcgtgatgacgactcgtgccaagatttgttcagtgacattcaaagcaggtgcaagcatcaccctaaatggaatcaaacccaaggagatgacacttctactcaaccacaccgccgagctaaggaccgatggtactattgataatgacgacaaaaaaattcaacagctcgtaaacaagcaggtgtccaagatgaaggggtccccgttggcggccgtggagatcggccacgagttgaggaaacaaaccacagttgacaagaggtgcgacatattgcacaacgttgagcatcatttggacaccgtgttacaggcccatctgttcacgtatcgccatctcttgccgcgcctgcagcgctgcttcgagttctgcagcatattcccatacaattggaggttcgagcctgagaagttgaccaagatgtggatagctcatggtttcgtcgaggaggacgcccaacaagaaggtcggagcatggaggatgtcaccacagactacttccatagtctggtggatcgttcattgttccaagaagaaggaggcgaaccagctggaggcaaagggacgacctatgtgatccatgagcaggtccattggatgatacgcatggcctctaccaagaactgcatcagcatctccggcacagcagtgagaagcatccctcccacagttcgtcacttgtctgtcaccagcagctctcttgatcagctcaaggcatatcctaaaatcatactcagcaacatgaggaccctgctagtcctaaaaaacaatcatggtgatgatgatgacgattcaacatcatcgacgcccttgatcagtacagttgacaagggtatactcaaactgttcaagggcgtgagagtactggacctgacagagacaggactaacacagctgccacgaactatcggcaagctgaaacatgtccgctacctagggcttccgagcaccatgaggaatctgtgtgatgaggtcactgggttactgtttctccagaccttcagccttggggggaagatgcagaatacctgtcggctgcagaggtttcccgaaaggatgaacaggctcgtcaacatgcgacacctcgacatggacatggagtgcatcgccaacatcagcggcatcgggaggatgcgtaaactgcaaggatccatcgagttcaaggccgtcagggcgtcagagaagcaagggcacgccatttcggagcttgcggggatggacttcctgcgagggacgctgaccataaagggcctcgacgccgtcgccggcaaggaggaggccatcaaggctcgactcgacaacaagagtgccatcaaggtcctcaagcttgaatggaggcctctagatccacggcgagttgacggtggacctgccgactccgacgccgttgccgtccttgaaggtctcgagcctcaccggggcctccgtgagctgcgcatcacgaggtaccctgggacgacgtcgccgacttggttgggccggggcatgatggtcaacttggcacgcctgtacctcaggaactgcaggaggctgcaggccctgcctgccgtcagcgggcttccttgcctggagcttctcgatatcaaggagctgccatgcgtcgagaggatcgacggtgacttctgcggcggcggtgcgttcccgtcactgaaggagatggtgctcgacgacatgccgaggctggtggcgtgggatgatatgcccagtctagccttccctgtgctcagggacgtaagcatcgccgactgcccactgctgtcctccttgtcgggcctccagcgctgcagaggtcccatccacctctgcgtcaagggaacgacggtcctcgcacgggcgaccctgcccaaaaatttcaatggcggtaactctacttgcaaattttac

SEQ ID NO: 172 - protein, 944 aa, Aegilops bicornis
MVVVGELGVGVSVMGWFLAPHITKLMEIARECAASKCMLYGDSTEMLQKLAEDLYDIKWHLHPHSTDFVNDQGKLDRLWRLKDDVHRVEEILDLFQLEIHDIETTGNYITRNKKRLPGKKVELSRQLAKVLKNLDETRDRARELRHGAGPSMSPKAETGQHTMRDKRSFFGYQDEYAQLVSMLWPQPDGHKLVKVDAKARRVVIAIVGHAGMGKTELARQVFRDAKGKFDLCIWVHAYGKNKELDLLKEIWRSADRPVGDMNVSSLQKKMENLLSSKRCLLVLDDVWNHELATNEEEREQASLALESIMSFAEGGSRIVMTTRAKICSVTFKAGASITLNGIKPKEMTLLLNHTAELRTDGTIDNDDKKIQQLVNKQVSKMKGSPLAAVEIGHELRKQTTVDKRCDILHNVEHHLDTVLQAHLFTYRHLLPRLQRCFEFCSIFPYNWRFEPEKLTKMWIAHGFVEEDAQQEGRSMEDVTTDYFHSLVDRSLFQEEGGEPAGGKGTTYVIHEQVHWMIRMASTKNCISISGTAVRSIPPTVRHLSVTSSSLDQLKAYPKIILSNMRTLLVLKNNHGDDDDDSTSSTPLISTVDKGILKLFKGVRVLDLTETGLTQLPRTIGKLKHVRYLGLPSTMRNLCDEVTGLLFLQTFSLGGKMQNTCRLQRFPERMNRLVNMRHLDMDMECIANISGIGRMRKLQGSIEFKAVRASEKQGHAISELAGMDFLRGTLTIKGLDAVAGKEEAIKARLDNKSAIKVLKLEWRPLDPRRVDGGPADSDAVAVLEGLEPHRGLRELRITRYPGTTSPTWLGRGMMVNLARLYLRNCRRLQALPAVSGLPCLELLDIKELPCVERIDGDFCGGGAFPSLKEMVLDDMPRLVAWDDMPSLAFPVLRDVSIADCPLLSSLSGLQRCRGPIHLCVKGTTVLARATLPKNFNGGNSTCKFY

SEQ ID NO: 173 - DNA, 2688 bp, Aegilops bicornis
  CDS (1)..(2688)
atggcggaggtcgtgaccggagctatgggtagcctcctgcccaagctcgctgacctgatcacagaggagtacagccttcagaggggtgtcaggggcgagatcatgttcctcaaagctgagatggagagcatgcagacggctctcctcaagatatctcaggcaccaattgaccagccaccagatatccaagtcaagctttgggccaaggcggtgagggacttatcatacgacctcgaagatagcatcgacaagttcatggtgcacatcgaaacccatggacaagacaattcccgcagtttcaagggtttcattgataagagcctcagcctcctgaccaagggcaagattcgccacaagattggcatcgatatcaaaggcatcaaaagccgtatcaaggaggtcagtgagcggcgtgataggtgcagggttgacagtgtggccattgccaagccaactggtccaactattgatacccttcgcctgtcagccctgtatagaaagtcgacagagctcgttggtactgacccgaagagcgtcgaggttgtcaagatgctaatgcaaggagatgaggtttccaaccgacagctgaaggtggtctctattgttggattgggtggattaggcaagacaacccttgctaatgcagtgtatgagaagcttaaagagaaatttaatattcaaaaacaaaatcagcaattcgacttttctgctgcttttgtttcagtgtctcttaatcctagcatggagaagattttcaagaacttgctctatcaacttgacaaacagaagtacgagaatatcaatgaggcaacatggggtgaagcgcaactcatcagcgagattagagccttccttagaaacaggaggtacttgattgttactgatgacatatgggataaatctgtctgggaaaatatcaaatatgctttgcctgaaaatgaatatggaagtaaagtaatcacaacaactcgcattcttgatgttgcccagcaagccgatgatgtttaccggctggagcctctttctattgttgattcaaggaagttgttctaccaaagaatatatgaggccgagaacaaatcaccacctaatcatttggtcgaaatatccgagaaagttttagaaagatgtggtggagtgccgttagctatccttacaattgctagtttgctgtccagtaaaaagggaagatcacacacgcatgagtattggtccaaggtatacaaatctatgggttcgggcctagataatagtcatgatgatgtgaagaacatgagaaggatattatcagtcagttactctgacctacctcctcacctgaagacttgtatactgcatcttagtttgtacccagaggattatgagattcaaactgaagagttgatatggaagtgggttggtgaaggttttgttaaaaatgaacaggggaggagcttatatgaggaaggagaagattacttcaacgagcttattaataaaagcttggtccaacctgtaaaatttgacaacgcgaataaagtgtgctcttgttgtgtacacgatatggtgcgtgaccttatcacttccttgtcaactgaggagaatttcctaacaacatttggtggtcagcagccagtgtatctaccaggtaagatccgtcgactgtctattcacacctgccttgaagatcagctgccaaccatgggcttgacccatgtgagatcacttagtgtgtctagcccagctttctgtctattgccagcactttcgggttttccagtcctgcgtgtgttggatttaactgactgcaagcaagtggataataatcattggaaggatatatgcagtttgtttcacttgagatatctgaatttaaagggcacatctgtcactaagatcccccaaaagattgggaatctgcaatttctgcaggtgcttgacatcaggtccaccagaatagaagaagagctgccgtcaacctttattcaactgacacgactgttgttattccacatgcttgatagcatcacttttgcagtgccgaggtggatgtgctccatgtctttcctcttctccctaagtatcacacttgaaacactgggagaggaagaccttcaagttctcgggagtataccatctctcagtgaactgctcatacaagtgaagaaacctacacatggcagagacaaacggttggatgttggcagtggttatccatttcggtgtttaacaaggttcattttcaagagtgataccatggagttgaggtttgaacgaggagccatgcaaagtctccaaagcctgtggttagattttgaagatgtgcaggacacattacttcagtttggtgattttatattgggtttagagaatctctcttcgcttgagcatatttatgtttgcttcagaaaaggcaacgacactgcagaggagatgcaaagtgtgagaaattcagttcagaaggagatggatatgaatcgaaacaagcccatactgatgttcccactaacattggaagaggaaatacgtcgtcaagaggaactttgtcggaatgccgcgctgaaatacctgaacgctgttcgcaaggaggcaataatgctgggtggtggggcaaataatgctcctcaagttactgatcgtgagctgagacggttgctagtaattaatcaggttatcagaggcaaagaccaggatgcagacttgggcacc

SEQ ID NO: 174 - protein, 896 aa, Aegilops bicornis
MAEVVTGAMGSLLPKLADLITEEYSLQRGVRGEIMFLKAEMESMQTALLKISQAPIDQPPDIQVKLWAKAVRDLSYDLEDSIDKFMVHIETHGQDNSRSFKGFIDKSLSLLTKGKIRHKIGIDIKGIKSRIKEVSERRDRCRVDSVAIAKPTGPTIDTLRLSALYRKSTELVGTDPKSVEVVKMLMQGDEVSNRQLKVVSIVGLGGLGKTTLANAVYEKLKEKFNIQKQNQQFDFSAAFVSVSLNPSMEKIFKNLLYQLDKQKYENINEATWGEAQLISEIRAFLRNRRYLIVTDDIWDKSVWENIKYALPENEYGSKVITTTRILDVAQQADDVYRLEPLSIVDSRKLFYQRIYEAENKSPPNHLVEISEKVLERCGGVPLAILTIASLLSSKKGRSHTHEYWSKVYKSMGSGLDNSHDDVKNMRRILSVSYSDLPPHLKTCILHLSLYPEDYEIQTEELIWKWVGEGFVKNEQGRSLYEEGEDYFNELINKSLVQPVKFDNANKVCSCCVHDMVRDLITSLSTEENFLTTFGGQQPVYLPGKIRRLSIHTCLEDQLPTMGLTHVRSLSVSSPAFCLLPALSGFPVLRVLDLTDCKQVDNNHWKDICSLFHLRYLNLKGTSVTKIPQKIGNLQFLQVLDIRSTRIEEELPSTFIQLTRLLLFHMLDSITFAVPRWMCSMSFLFSLSITLETLGEEDLQVLGSIPSLSELLIQVKKPTHGRDKRLDVGSGYPFRCLTRFIFKSDTMELRFERGAMQSLQSLWLDFEDVQDTLLQFGDFILGLENLSSLEHIYVCFRKGNDTAEEMQSVRNSVQKEMDMNRNKPILMFPLTLEEEIRRQEELCRNAALKYLNAVRKEAIMLGGGANNAPQVTDRELRRLLVINQVIRGKDQDADLGT

SEQ ID NO: 175 - DNA, 2040 bp, Aegilops bicornis
  CDS (1)..(2040)
atgtgtattacagaaatccgagagctacttcaaaacaagaggtacttcttaattttagatgatatatgggatatacaagcatgggaaataatcaaatgcactttggtggattctaatattggaagtatagtaatcacaactactcagatttacactgtcgcccgaaatgccggtgatgtttacaaactagcgctactttctcatgataattctgaagaattattctataagagattatttggtggtaaagtcaaactccctgatgagcaaactcagctaattcagaaacttctgcaaaaatgtggcggagtaccactagctgtcattacaatagctagtttgttgtccagtacaccaaaggaggactggtacaagctgtgcaattctatcaattctggggctgcaaatggaactgatgttgagaacctaagaaatgcagttttgttaagctattatgatctacccatttatctaagggcttgcttattgcatttgagcatatttccaaaaaattatatggtcagaaaagatactttgatatggaagtgggttgcggaaggttttatcctggaggaatcaggagtagggttatttgagatcggagagcgatacttcaacgagcttatcaacagaaacatgatccaaccggtagagatctcacatagaggcattacagttggttgtcatgtccatgatatgatggctgatataatttgttccatggcacatgaaagacactttgttgccctattgtatcgtaacgagcagcagcacacatctacggaagttagagctcgccggttagccctccatggggaaggtgtggaagagcattatcctctggcttacattgacatgtcaatagtgagatcatttaacgccatcaggtgtgatgcaactatgatgccatcattggcaagttttgaagtgttgcgtgtcctcactatagaagattgtagtaactttcagctgaaaggtaatgcttatagcctacaacctatcagaaagttacttcatttgaggtatctgggactatggaaaactcctgttcatgagcttccagaagtaaagaatataaaacatttggaagtactggacctaaggcaaactgggataccagaactgccggagagtgttagtctgcttagaagactcaagtgcttgcgtgctgacggtggttccacggaagtgcctgattggattggtaccctgacatccctggaagaattatcattgaatgatgttagcagttgtccaaactttgtgaaagaggtgagcaagctgacagaattgagggacctaaaggtttggatccgttggttggatgagaggtcaaagaaagctctggtgaagtctcttggcaatctgcagaaaatccaagttttgcatcttgatggtggattgtggatagaggatgccgaatgggaaggatatgtgccccctcgacaactccgctgtctaagcctaaggaccaaatcatcaagactgccgagatggattaaggactcctttcttccgaacctctcccatttatcagtggatgtaagggttgtggaggcggaggatctgacgattcttgggagtttcccagagctcatgactctcgagctgttcgtgcccaacagtgtctcactcctattcgagggccaccctggcagtgcattcccccaactgaggcactgctacacctctggaatgctcaggttcctacagggagctgctccacaacttgaatctgtccatttcaacgtcagtttgtcagccttgaatggtgccagctttcagtgtggtttcttgggaaaccttcctttgcttgtggaagtcagagttgaaatcttccactcggacgttgaggtgcaccgtgctgaggaggtggaggaagcgctcaggctcgcagttaaagtacatggcaacagtcccacacttcatgtcagcaaattcgaactgtccttggatgaggatgctgagaaagaagaagatgacatcgagttggaggaagaggatgaggaggactggtactcacccactgccaacgcgact

SEQ ID NO: 176 - protein, 680 aa, Aegilops bicornis
MCITEIRELLQNKRYFLILDDIWDIQAWEIIKCTLVDSNIGSIVITTTQIYTVARNAGDVYKLALLSHDNSEELFYKRLFGGKVKLPDEQTQLIQKLLQKCGGVPLAVITIASLLSSTPKEDWYKLCNSINSGAANGTDVENLRNAVLLSYYDLPIYLRACLLHLSIFPKNYMVRKDTLIWKWVAEGFILEESGVGLFEIGERYFNELINRNMIQPVEISHRGITVGCHVHDMMADIICSMAHERHFVALLYRNEQQHTSTEVRARRLALHGEGVEEHYPLAYIDMSIVRSFNAIRCDATMMPSLASFEVLRVLTIEDCSNFQLKGNAYSLQPIRKLLHLRYLGLWKTPVHELPEVKNIKHLEVLDLRQTGIPELPESVSLLRRLKCLRADGGSTEVPDWIGTLTSLEELSLNDVSSCPNFVKEVSKLTELRDLKVWIRWLDERSKKALVKSLGNLQKIQVLHLDGGLWIEDAEWEGYVPPRQLRCLSLRTKSSRLPRWIKDSFLPNLSHLSVDVRVVEAEDLTILGSFPELMTLELFVPNSVSLLFEGHPGSAFPQLRHCYTSGMLRFLQGAAPQLESVHFNVSLSALNGASFQCGFLGNLPLLVEVRVEIFHSDVEVHRAEEVEEALRLAVKVHGNSPTLHVSKFELSLDEDAEKEEDDIELEEEDEEDWYSPTANAT

SEQ ID NO: 177 - DNA, 2679 bp, Aegilops longissima
  CDS (1)..(2679)
atgtgcgcgttcctcctcaagatgtcagatgtggaggagcccgacgaaccaacaaagctgcgtgtgacggcggtgcgggagatgtcctataagatagaggacaacatcgacaagttcatggtcctcgtggagcacgagtcctccggctccgaggcggctcatggcgtcgccaagctcatggacaagtgcaagaacttgctgccggacatcaagacacgccgcaggatcgccaaggaggtcaaagacatcaagaaacaaatcaaggatgtcagcgacagattttcaaggtacaagattgacgactcctcctcctctatgccggcaaaagacaaggtcgaccctcgacttcgagcagtctacaaagacgccacagagctcgtcggaattgacggaccaaaagatgaacttgtcaagtggctgaatgagaaagagggccaatcacttaaatctgtctctattgttggatatggagggttgggcaagaccacgctcgccaaccagatccgggtcaaccttggagcgacctttgactgtggggcttttgtctccatttcacgcaagcctgacatgaaggcgattttaagatctatcttatcacaaatcaccaagaaagaccatgcttactctagattagatgatatacaactcatcatcgacaagattcgagaattcctccaagacacaaggtacttcatcataattgatgatatatgggagttaggaacatgggaaactttgaaatgtgcatttgtcaagaatacattgggcagcagaataattatcacaacacgtatagttgatgttgccaaatcttgctctccttctagtgaagatcttgtctatgagatgaaaccactcagtgaggctgactcaaagaaattgtttttcaagaggatatttggttgtgaagaaaactgtcctgatagcttgaaagaagctgccaatgatattttgaaaaaatgccatggtctgcctctggccatcaatgccatttctagcctgttggccacaacaagggaaacaaaagaagagtgggatcgggtgcgacattcaatacgctcttcaaaggtcaaaagtgatataatagagaccatgaattacatattatcccttagttattttgatcttccccaccacctaagaagctgcttattgtacttggctctgtttcctgaagacgaattgattggaaggcagcggttggtacgcagatggatttctgaaggctttatccatggagaaagtggacaagatctcatggaattaggagaggaatattttcaccagcttgtgaacagaagtctaatacagcccgtcaacatagggtatgacggcaaggcggagtattgccgagtccatgacaccatccttgatttcctaattgacaaatcctccgaagagaacatgtgtaccgtcctaaagaaacaatgcaagcctaatggcatagttcgtcggctctctctaatggggaatgaggatgaagaaatcgtggagcaattggatctgtcacacgctcggtcaatcactgcttttggggatatcaagctattgccttcgcttgggaggtcaaaatgcttgcgcgtgctagacttgcaccggtgcaatcagttgaaaaatcatcatttcaaggatattgaaagactctatcagctgagatacttggatatctcttttacaggaatcacggagcttcccgggcaaattggggagttgctatatctagagacgctagttacatcctatgaattacttcagcttcctgaaagcacaactcggctacaacgactggcacgtttgcttgttgactgcgattgtaagcttccagatgggttgggaaacttgataaacttgcaagagcttgactgcgttgatgccttgcagttgaagcatgtggaagagctcggcaaactaacaaatctgagaaagctgaggattaaattggacactgatgggattgaaggcaacaaattagaacagtccaaggaaaagctggtgtcctctctctgtaaactggacgaatgcggcctccgttccctgagtattaattattatctgagagaaaaggatggagaagagccgttcctccctgctttgggttgtatccagaaggtttgtgtatatggacaagatatcagccggattagcagatggctcgcgtcacttcccaacctacacaagttgtcttccaacgatccgaagatagagcagcaggatattgagatgattggattgatacccaatctgatcgatttgtcactgtctttacacataacagacgacgctgggcggctcatcatcaggcgtgaaggatttcaacagttgcagagttttggggtttacagtcctcgtatgggagttttaatgtttgaaccgggggctatgccgaggctcaaggagcttaaactctctggcttcatggaaaagcccaaatctgctgcgggcggtttcgactttggcatccaacgcctctccagccttgctcgcctcactgtcagcttatactgcggtggctcgacggcggcagaagtagaggctgcggaggaagctttcaagagcatggccgaggcgaaccccaaccgtccaatactggagatgacaagacttaatccgcaccatatgttacgagacgagcaaataggtactatgacaggctcagctacaacgccggccgtcaagtcc

SEQ ID NO: 178 - protein, 893 aa, Aegilops longissima
MCAFLLKMSDVEEPDEPTKLRVTAVREMSYKIEDNIDKFMVLVEHESSGSEAAHGVAKLMDKCKNLLPDIKTRRRIAKEVKDIKKQIKDVSDRFSRYKIDDSSSSMPAKDKVDPRLRAVYKDATELVGIDGPKDELVKWLNEKEGQSLKSVSIVGYGGLGKTTLANQIRVNLGATFDCGAFVSISRKPDMKAILRSILSQITKKDHAYSRLDDIQLIIDKIREFLQDTRYFIIIDDIWELGTWETLKCAFVKNTLGSRIIITTRIVDVAKSCSPSSEDLVYEMKPLSEADSKKLFFKRIFGCEENCPDSLKEAANDILKKCHGLPLAINAISSLLATTRETKEEWDRVRHSIRSSKVKSDIIETMNYILSLSYFDLPHHLRSCLLYLALFPEDELIGRQRLVRRWISEGFIHGESGQDLMELGEEYFHQLVNRSLIQPVNIGYDGKAEYCRVHDTILDFLIDKSSEENMCTVLKKQCKPNGIVRRLSLMGNEDEEIVEQLDLSHARSITAFGDIKLLPSLGRSKCLRVLDLHRCNQLKNHHFKDIERLYQLRYLDISFTGITELPGQIGELLYLETLVTSYELLQLPESTTRLQRLARLLVDCDCKLPDGLGNLINLQELDCVDALQLKHVEELGKLTNLRKLRIKLDTDGIEGNKLEQSKEKLVSSLCKLDECGLRSLSINYYLREKDGEEPFLPALGCIQKVCVYGQDISRISRWLASLPNLHKLSSNDPKIEQQDIEMIGLIPNLIDLSLSLHITDDAGRLIIRREGFQQLQSFGVYSPRMGVLMFEPGAMPRLKELKLSGFMEKPKSAAGGFDFGIQRLSSLARLTVSLYCGGSTAAEVEAAEEAFKSMAEANPNRPILEMTRLNPHHMLRDEQIGTMTGSATTPAVKS

SEQ ID NO: 179 - DNA, 2769 bp, Aegilops bicornis
  CDS (1)..(2769)
atggcggagatgatcgcgatatcgctctcggcgaaggtcgccgcaacgctgtcgcgcagtccggccgccgacatctcctctctcgtcgccgtccgctcgggcatctccgccgcggcacgggacctggagctcctccgcgcgttcctccggttcgccgactcccgccgcggcgcggacgcgctcgcctccgcctgggtggaccagatccgggacgtcggcttcgagctggaggacgccgcggacgagtacgccttcctctctggcggcggcttcgtccgcgcctgcgctaacttcggcgcgtggctcgctctggccagacggctaggcaaggcgcgggtgaggctccgcgacctgtcagacgccaaggagcggtacggcatccagccggccgaggcctccgcgtccaactccgctaccgacggcggcaccgggcccgtcgtaggccggaagctagcggaagcagcgcatttcttgcaggatggggagatcgtcggcttcgcggcgcacagaaggtcactgatgaaatggctcacggaggaccttgactctcggaggtcgctggtcgccgtgtgtggaatgggcggcgttggcaagaccactctggtcaccagcgtgtacaaggaagtcgccgcaagccgccacttcgactgtgctgcgtgggtgtccgtctccaagaacttcacgacggatgacctcctaaggaaaattgccaaagaactgcaccgggacgcccgtgccggcatgccagacattgacgagatggactaccggtcgctggtggaagctttgcgtgggcatctcgccaagaagaggtacttgttattgctggatgatgtctgggatgccgatgcgtggtatgaaatacgcaatgcattggttgatgatggaaaagggagcaggataatcatcacaacacggagtcaagatgttgcctctctggcagcatccaccaggatcatcttgttggaaccgctccctcagcaagaagcatggtccttgttttgtaacaccacattcagggaagatgccaaccgggagtgcccgcatcatctggagcattgggcttccaagatactgggcagatgttgtggtctaccattagcaattgtgtcagttggtaacctccttgcattgaaaaatagaatcgaatttgcttggaagaatgtccatgacagccttgattggaatggaagcaatgtccgtggaattgggcaagtgtcaagcatactgaatttgagcattgacgatctgccttatcacctgaagagatgtttcctgtattgcagtatataccctgaagatttcttaatcaaaaggaaaattctgatcaggttgtggattgcagaaggctatattgaggaaaagggccagggcacaatggaggagactgcggatgattacctgaaccagctagtgcaacgtagcctgttgcaggtcaagttaaagaatgagtttggacgagcaaaacggttctgcattcatgacctgatcagggatttgattctgcaaaggtcaacaaaagaagggttgacagtattctcaaagtgttccccagcgttggtgtcaagcaaaaaagttcgtcatcttatacttgaccgatgcgtaaattatcatctaccggttccaaagatggcattgcttcgctccttcaacgcatttaaggcagatatggattcctcagtcttgtctggctttaggttattaaccgtattaaacttatggttcgttcagatagataaactacctagttcattgaccaatcttcttaatttgcggtatcttggcatccgttccactctcattgaagagcttccacaggatttggggaaattacatcacttgcaaactttagacgccaagtggtccagggtccagagactaccacctagcataacaaagctcaagagcctgcgccacctgatagtgtttagacgccgacctgcagattttaggtaccctgggcctggtacagcaattgtatttccagaggggctgcaaaatctaacctgcctgcagacccttaaatacattgaagctgatgagaacatggtcaagtccttaggaagcttgaaacatatgaagagcttagagctatttggtatgcatgagagcattcttgttcatttgccctcatccatctccaaaatgagcagccttctgcgtttggggattgtcagccgagatgctaatgtatcattggacctagagccattttatccaccaccaataaagctacagaaactttcattgacagggatgttaacgcgaggtaagttgccttcatggtttggccaccttgataacctcgtgcagttgcagttatgttcatctgagctcaagagagattcaattggattgctctcatcacttcccaggctgttacatcttaccctaaagaatgcatacaatgacaagagcttgacctttccggaaagctgttttccagttcttaagaagctgagcttacatgagttgcctaaactttgtcacgtagagtttcaaaaggggagtcttgtacatcttaatgtgctaatcctaggccgttgtgatgagctaactgaaataccacaaggcatcgagaacctcacagagctcgacaacctggagctttttgaaatgccaagtgagataatacaaaagattcaaggtgcggaagtaaagaggaataatgaagattctcggcgtactacaactgttaagaacacctgctggtataatggacaattcttgcagaaaacaatttacaccgacctattcactattcaaatg

SEQ ID NO: 180 - protein, 923 aa, Aegilops bicornis
MAEMIAISLSAKVAATLSRSPAADISSLVAVRSGISAAARDLELLRAFLRFADSRRGADALASAWVDQIRDVGFELEDAADEYAFLSGGGFVRACANFGAWLALARRLGKARVRLRDLSDAKERYGIQPAEASASNSATDGGTGPVVGRKLAEAAHFLQDGEIVGFAAHRRSLMKWLTEDLDSRRSLVAVCGMGGVGKTTLVTSVYKEVAASRHFDCAAWVSVSKNFTTDDLLRKIAKELHRDARAGMPDIDEMDYRSLVEALRGHLAKKRYLLLLDDVWDADAWYEIRNALVDDGKGSRIIITTRSQDVASLAASTRIILLEPLPQQEAWSLFCNTTFREDANRECPHHLEHWASKILGRCCGLPLAIVSVGNLLALKNRIEFAWKNVHDSLDWNGSNVRGIGQVSSILNLSIDDLPYHLKRCFLYCSIYPEDFLIKRKILIRLWIAEGYIEEKGQGTMEETADDYLNQLVQRSLLQVKLKNEFGRAKRFCIHDLIRDLILQRSTKEGLTVFSKCSPALVSSKKVRHLILDRCVNYHLPVPKMALLRSFNAFKADMDSSVLSGFRLLTVLNLWFVQIDKLPSSLTNLLNLRYLGIRSTLIEELPQDLGKLHHLQTLDAKWSRVQRLPPSITKLKSLRHLIVFRRRPADFRYPGPGTAIVFPEGLQNLTCLQTLKYIEADENMVKSLGSLKHMKSLELFGMHESILVHLPSSISKMSSLLRLGIVSRDANVSLDLEPFYPPPIKLQKLSLTGMLTRGKLPSWFGHLDNLVQLQLCSSELKRDSIGLLSSLPRLLHLTLKNAYNDKSLTFPESCFPVLKKLSLHELPKLCHVEFQKGSLVHLNVLILGRCDELTEIPQGIENLTELDNLELFEMPSEIIQKIQGAEVKRNNEDSRRTTTVKNTCWYNGQFLQKTIYTDLFTIQM

SEQ ID NO: 181 - DNA, 3114 bp, Aegilops searsii
  CDS (1)..(3114)
atggaggcggcgataatcggcgcgctgctgaagaccacgctgccgaaggccctgtcggcgctgggcgggagcagggacgtccggtccatccagtcggagctcaggtacatcgaggccgccatccaagaccaccgcaagaagaccggcggcagggacacgagccacctgcgggcggcgtggatccacgacctgacgcgcttcgcgttcgacatcgaggactgcgtcgaccgcttcctgcggcaggagacgccgccggaggacggtgacgccggcttcctccgccgctccgctcgcgtcgccaagaacacggtgttcacccgcacctggttctccctcaagatccgcaagctcaaggccagatccgaggagatacaccggcgcctcaagcgctacatcgaggaggagacggctgaggcgacgacgccagactgcggcgcggcgtcggtccctgctgctcgatgcggtgctccggcggcggccgtggggatggacgagcccctcggggagcttcttgagctcgtgcgggagcctgggacgccgtcggaggggaagctcagggtgatctccgtcgtcggctgccatggcctgggcaagactcttcttgcccaccaggtgttcgaccacggcgacgtgcaccgcctgttccctctgcgggtttgggtttgcgccgcgggcaagggcacgccggaggttctcaaggagatgctcgatcaagtgctccagagtggcgcgggcacctccgcggatggtgcccggcaggttgactctgcacctgtgaccacctccaactccaactgcgtcatcccacaggttgaggagaatggcgttgagcaagtccagaatggtgagagtagctcagccggtgtcgcgcacggcgtcagtatgtggcgccagtgcctccaagcagtttggtggactatgacgacgatactgctgtacatcttgtccccggccttctccgtcgcaaacatggtgcgagcctcttctgcccaagttgagtctgcagacatacatggtgctactgtgaatgtgaatacctctaccagtaccaagatcgtcccacaagtcgatgagaacaagagtgtccagatggagaggcaagctgacaggggcaaggctattcaggaggacactcacgaggaaggtgtatgtgctacgacgctcatcgaacaacgtctaggatcatacctgaagaataaaaggtatttgattgtaattgatggcatgcaaacagaagagttgtgcaacataacatctgtattccctgtggataacggagtggacagcagagttattgtgacgacaaccattaagaaaatagcaagacgctgcagctctgccaatggtcgtgtgtacaaaatgaaaacacttgatgacaatgattcaagaaagttgttcttcgaagtattttccaagggtaagtattcagttgcagatgcaacagagttgaaagcatctgccctcctggagaaatgtggcggcctacctcttgcccttgaaagcaaagcaaagtttctgaagagtgaggaagacctgacaaagagtaaatgtgaagatgcctgccgcaagctttgtgctccagaagggtgtgacgacacactgggaaggatgcatggggttctcgccagcagctacgagagtctatgtagccttgttctccagcagtgcttgctatatttctgtatgttcccgcgtggccatcgtgtcaggcggaatcctctaatcaggcggtggctggcggaaggacttgtacatgtacaaccaggggatgcagtgagcaccacaccccaggacatcgcaattgagaatttggagaccctgatcgaccgcagtatcattcagtccacggaagtgagcacctgtgggcatgtgaagagatgccaacctcctgggatgatgctcgagtacattgtccgcaagtccatgtctcaaaatttcatcaccttgctttgtggtgagagtgagacggccggagaatgggactacgttcgccgactttctctccatgattactgtgctgaaaaactgcccaagggcttatctcgtctgcggaccctggcggtattccctaccagggatgctgctaaacacggacctacattgaattttgccaagtatgacctactgcgagtgttggatttagaagaatgtgatggtctgaatgacgggcacctccagagcatatgcaaccttgtgtttctgaaatatctgagcctggggggctgcattagtgaggtcccaaagaaaattgccaagctgcaatggttagagacactggatctgaggagaaccaagatagagaaggtgcccatggaagtcatccagctcccccaattaaagcatctccatggcaaatttcagcttattgaaggtgactgcggaaagataaatccagagtacttgtctaagagaagtaccctggagacactttcaggatttgttacgggagagagcgaaggatttccacagctgatgaggcacatgaagcggctgaggaaggtgaaaatatggtgcgaatccaccgcaagcagaagaaacctgaaccaacttgaagaagccatcaaggtgttcattcgtgatgggaacgaatggcctcatcgctccctatgcattgacttccaagaatgctcagacccattcttgggttctctgaaagcccctggcagtcttgcctcgctgaagctgcgcggcaacctcagcggattccctcagtttgttacgaagctgaacagaatcgaggagctgtgtctgtcgtcgactaacctaagccggggtgttcttctatctgggagtcgtctggatacacttaagtatctgaagctgatcgaagacaacatcgggcctctcgaaatacggcccgagcacttcccaagcctcaggcggatatggctcgtcggcgtgaaaagtctgcactctgtaacgaccggagctctgccacatcttacttcgcttcatatgatctgtgaatctttagatggtcttgctggcatcgaaatcggacgcctagaaggattaaaggaaatcaggctgcattctgcagtcgatcaaggaacaaaagatgcatggaagaaaactgcaaggagccacccgaaaaggcctgacgttcttcttcac

SEQ ID NO: 182 - protein, 1038 aa, Aegilops searsii
MEAAIIGALLKTTLPKALSALGGSRDVRSIQSELRYIEAAIQDHRKKTGGRDTSHLRAAWIHDLTRFAFDIEDCVDRFLRQETPPEDGDAGFLRRSARVAKNTVFTRTWFSLKIRKLKARSEEIHRRLKRYIEEETAEATTPDCGAASVPAARCGAPAAAVGMDEPLGELLELVREPGTPSEGKLRVISVVGCHGLGKTLLAHQVFDHGDVHRLFPLRVWVCAAGKGTPEVLKEMLDQVLQSGAGTSADGARQVDSAPVTTSNSNCVIPQVEENGVEQVQNGESSSAGVAHGVSMWRQCLQAVWWTMTTILLYILSPAFSVANMVRASSAQVESADIHGATVNVNTSTSTKIVPQVDENKSVQMERQADRGKAIQEDTHEEGVCATTLIEQRLGSYLKNKRYLIVIDGMQTEELCNITSVFPVDNGVDSRVIVTTTIKKIARRCSSANGRVYKMKTLDDNDSRKLFFEVFSKGKYSVADATELKASALLEKCGGLPLALESKAKFLKSEEDLTKSKCEDACRKLCAPEGCDDTLGRMHGVLASSYESLCSLVLQQCLLYFCMFPRGHRVRRNPLIRRWLAEGLVHVQPGDAVSTTPQDIAIENLETLIDRSIIQSTEVSTCGHVKRCQPPGMMLEYIVRKSMSQNFITLLCGESETAGEWDYVRRLSLHDYCAEKLPKGLSRLRTLAVFPTRDAAKHGPTLNFAKYDLLRVLDLEECDGLNDGHLQSICNLVFLKYLSLGGCISEVPKKIAKLQWLETLDLRRTKIEKVPMEVIQLPQLKHLHGKFQLIEGDCGKINPEYLSKRSTLETLSGFVTGESEGFPQLMRHMKRLRKVKIWCESTASRRNLNQLEEAIKVFIRDGNEWPHRSLCIDFQECSDPFLGSLKAPGSLASLKLRGNLSGFPQFVTKLNRIEELCLSSTNLSRGVLLSGSRLDTLKYLKLIEDNIGPLEIRPEHFPSLRRIWLVGVKSLHSVTTGALPHLTSLHMICESLDGLAGIEIGRLEGLKEIRLHSAVDQGTKDAWKKTARSHPKRPDVLLH

SEQ ID NO: 183 - DNA, 2574 bp, Aegilops sharonensis
  CDS (1)..(2574)
atggagaagttcctgttcgaggagctggccggggacgccgtgcgggagctgctgcgcgcggtgcagggcaccttcctgtgccgctccaccgccgagcgcctgcgccggaacgtcgagccgctgctgcccctcgtgcagcagaacggccgccacgcgctccggagcaacgccgagctgggcgagctcgccgtgcagctcagggaggcgctcgacctcgcgcgccgcgccgccgccgccccgcgctggaacgtctaccgcaccgcgcagctggcccgcaggatggaggccgccgacaagggcatcgagcgctggctggcgcgccacgcccccgcgcacgtgctcgacggcgtccgccgcctccgcgacgaggccgaggcgcgcatcggccgcctcgagcgccgcgtcgaggaggtcgccgcgatgcaagcgcccgccacgatcccgcccgccatgtccctccccgtcgcgctgccaccgccgccctccaagggcatggcgatggcggtagaggtggcgccgccgaccaaggccatggggatgccgatggaggtggcgccaccgaccaagggcatggggattccgatggatttcgacctcccgtgcgaggaggagagcaagggcggcggcttggtgggaagcggcgtcaaggtaggcaaggagagagtgaaagagatggtgatgagcagcggcggcggctgggaggtcgtcggcatctgcggcatgggcggcagcggcaagaccacgctcgccatggagatctataaggatcaaaagatccaaggctacttcaacaacagggtcttctttgagacggtctcacagtccgcaaatctggagaccatcaagatgaagctgtgggagcagatcagcagcaatattgtgcttggtgcatataaccagataccggaatggcagctcaagttagggccaagggaccgaggaccagtccttgttatacttgatgatgtgtggtctctctcacagctcgaggagctggtcttcaagttccctggctgcaagactcttgttgtgtcaaggttgaagttccccacgttagtctcccggacttatgaaatgaaattactcggcgaagaggaggctttgtctgtcttctgcagtgctgccttcgatcaggagtctgttcctcagactgctgacaagaaactggttaagcaggttgctgccgagtgcagagggcttcctctagctctcaaggttatcggcgcatccttgcgtgatcagcctcctatgatatggttgagcgcaaagaaccgcttgtcacgaggagagtctatatcggactcacatgagaccaaactcctggagagaatggcagcaagtgtcgagtgcttgtcaggaaaggttagagaatgtttccttgacctgggttgcttcccagaggataagaagatccctcttgatgtgttgatcaatatttggatggagatacatgatcttgacaagccagatgctttcgccatcctcatggagctatcgaacaagaacctgcttaccctagttaatgatgcacagaataaagctggagatctatacagtaactatcatgattactcggtgacgcaacatgatgtgttgcgtgatctggcacttcacatgagcggtcgtgattctctgaacaaacggaggcggttagtgatgccaagaagagaagaatcgcttccgagagattggcagaggaataaggaccttccctttgaagctcagattgtttctattcatacaggtgagatgaaagaatctgactggttccagatgagcttccccaaggcagaagttcttatcctcaacttcgcctcaagtgtatactacctcccgtcgttcattgcaacaatgcagaacctgaaggccctggtgctgatcaactatggtaccaccagtgcagcccttgacaatttgtctgccttcaccacactaagtgacctgaggagtctttggctggaaaagattacgctcccgccactgccgaaaagcacaatcccactgaagaacctgcgcaagatctccctcgtcctttgtgagctgaacaacagtctaagaggatcaacgatggatctctccatgacgtttccgcgcttatccaacctcaccatcgaccattgcgtagatctgaaggagctgccacctagtgtatgtgaaatcagctctctggagagcatctccttgtcaaactgccatgacctcacagagctgccatatgagctgggcaagctgcactgcctgagcatcctgcgggtgtacgcctgcccggcactgtggaagcttccaccgtcggtatgcagcctgaagaggctgaaatacctggacatatcgcagtgcattaaccttacagaccttccagaagagcttggccacctgacaaacctagagaagatcgacatgcgggaatgctcgcggttgaggagcctcccgaggtcctcctcgtcgttgaagtccctcgggcacgtcgtgtgcgacgaggaaacggcgatgctgtggagggaagccgagcaggtcatcccggacctccgtgtgcaggtagcagaagagtgttacaacctggactggcttgtagac

SEQ ID NO: 184 - protein, 858 aa, Aegilops sharonensis
MEKFLFEELAGDAVRELLRAVQGTFLCRSTAERLRRNVEPLLPLVQQNGRHALRSNAELGELAVQLREALDLARRAAAAPRWNVYRTAQLARRMEAADKGIERWLARHAPAHVLDGVRRLRDEAEARIGRLERRVEEVAAMQAPATIPPAMSLPVALPPPPSKGMAMAVEVAPPTKAMGMPMEVAPPTKGMGIPMDFDLPCEEESKGGGLVGSGVKVGKERVKEMVMSSGGGWEVVGICGMGGSGKTTLAMEIYKDQKIQGYFNNRVFFETVSQSANLETIKMKLWEQISSNIVLGAYNQIPEWQLKLGPRDRGPVLVILDDVWSLSQLEELVFKFPGCKTLVVSRLKFPTLVSRTYEMKLLGEEEALSVFCSAAFDQESVPQTADKKLVKQVAAECRGLPLALKVIGASLRDQPPMIWLSAKNRLSRGESISDSHETKLLERMAASVECLSGKVRECFLDLGCFPEDKKIPLDVLINIWMEIHDLDKPDAFAILMELSNKNLLTLVNDAQNKAGDLYSNYHDYSVTQHDVLRDLALHMSGRDSLNKRRRLVMPRREESLPRDWQRNKDLPFEAQIVSIHTGEMKESDWFQMSFPKAEVLILNFASSVYYLPSFIATMQNLKALVLINYGTTSAALDNLSAFTTLSDLRSLWLEKITLPPLPKSTIPLKNLRKISLVLCELNNSLRGSTMDLSMTFPRLSNLTIDHCVDLKELPPSVCEISSLESISLSNCHDLTELPYELGKLHCLSILRVYACPALWKLPPSVCSLKRLKYLDISQCINLTDLPEELGHLTNLEKIDMRECSRLRSLPRSSSSLKSLGHVVCDEETAMLWREAEQVIPDLRVQVAEECYNLDWLVD

SEQ ID NO: 185 - DNA, 3597 bp, Avena abyssinica
  CDS (1)..(3567)
atggccgcggccgccgtcgtgggcatggtcgcctccggtgttatcaaggtggtgatccaagagatcggttccgccattaagggcgagctcaagctgcacaagaacttgaggaaggatatggagaagatgaagatgacacttgaggcggtggaagccgtgctcagcgtcgccgaaaggcgttctatcacggacgaacctacgcgcctgtggctgaagcggctcaaggacgccttgtatgagatctccgacatgcttgatgacttcaaggctgatgagaaaaacctgttggaaggtgttgtcaagaagtttaagatgccaaataagatgaaagagatgcaacagaggctgcaggagatatcagaagaccatatgaaatatagcattccagcagaaactcgcagcgacaagcagcccgttcctgatatccgggaaacacccgtgaatgcagaagaaacagatcccattgggaggactgataacaaacaaaagatcatgggtcgcctatctaagggaaccactgaagagaccaccttcctttccatatggggctttggaggcatcggaaagaccaccttggcaagattggtttacaaggatccccagttcaaagagtactccaaggcctgggtctatgtgtctgagaaacttgacttgaaaaaaattggtaattctataatatcacaattatcagaaaaggaagagcagaccaagatagacgagttgaagatcattcatgattgccttgaaaagctacttgctggtaataagaagattctgatcattttggatgacctgtgggagaagcgtccttctgaacttgaaaaattgaaggttatgctaaagcaggctgaggggagcaaggtgatggttgtggtaaccacacgcgaagaaagcactgcaaaggaatttggtagtgttgatccatactgcttagctcctttgacagatgaaatgtgctggaatattattaaacaaaaatgcaactttgaagcttgtccttacaaagaacgtttcgagccgattggaaaggaaattgcaaaaaggtgtggaggtgtgcctttagctgctcaatcacttggacacatgttaaaatacaagccatatgatgtgtgggtttcggtaaggtccaaccatatctggaatctacctaatgctagagatacatcatccacacatgaagtgcttgcatccttgttgttaagctacaacttcatagataatccatccttgaagttatgctttgcttattgtgcaatctttccaaaaggtcacaatataattaaagatgatctaattcatcaatggattgctcttggattcatggagccatatactaataatatattatctacctggcaactcggtgagagttatgttaggcagcttctggagatgtcatttctgcaacactccaagaccgtcgcagaacgtttctacgcaagagaagatgatacattattcaccatgcatgacctggtgcatgacctcgcaagatcggttatggctgacgaattgtacttgaagggccccaattgccgctatgcatgtcttacagattttaccaagccattgaagtcatccgctacttcacctgcaaagataaaggcactgcatattgtggaccatcctgatgattgcttgaaagaaaatcagttccatcctgatgcatattcacaagctaagcacctccgtgtcttagtcctagatgtaagcccatactctttaagggagttgccatctattggtaaattgaagcagttgaggtatcttagtgttccaaatatcagtggtcgaatggatctgaggtgtatcacccagctcataaaattgaattatctcaaccttagtggttctaaacatctctcaggattgcccgagtcaattagtgaaatcaaaggtctgatgcatcttgacttatcgtattgccgaaatctaaaagaactcccattgtcatttggcacgctcagagagttggtatacctggacttatcacactgtcgtggcgttttaggaataccagaagctttgggtggtcttaccaaactccaacatttgggattatcagaatgtaaaaatctgagagggctgccagaagtcatcggcagtcttactgaactccggtatttgaatctaacaggatgcatgcattatatctttgccagctcatcggaaaatcaaacggagagtttcattcactgtatatgcacacttcccaatatgcagcagctgaacttatctcggaatgaatattatcttagtataccaggaagtgcccgccgcctcaagaagctgaacctctgtgggtgcagcaatgttactgggcttccaagatatgcggctaaaatgaatggaatcatctcggaacagctggaacttgagcctattttttctgtatatgcatatggtactggatctaggagtaacctttacttgcttcagcctataaatcgtgacgtgctgcatatcgagatgcttgaaaatgtgcagtgcgcagaagaagcaaacagtataaatatcaataaaaaacaggaaattagaaaattgacattagagtggaccagagatgctaacagatgtgtggaagacaaggagttgctgagggagctagtgccaccaaccagtttaaacgagtttatgatagagggttacagtagtgtagcttttccggactggctcatgaatattagcaattatctccctaatcttggcagcatagtgatgtgggatttgcccaggtgtagccatctaccacccctcgcccaactaccaaacctccgagtgcttactctgaaggggatggaaagcctggaagaatggaacacaacagattctagtttgagtgggcctatgttccgtatgcttcaggaagtgaatatacattgttgccccaagttgaggataaaaccacgacttcctagagctgcatcttggaatataagcggaggtggtaatgtgctcacatcatggggagagatcgcgtcacacactggtgcttcatcatcttcttctccagtatgtactcatctgtcagttcagtacacaaatgtgcctctattacagtggaatttacttcaccacgtaccttccgtgagtgacttaagaatcgaattttgcagtgatttgacaagttccccagagatcatccgggccctccgctccctcagatcactgacactgtcattccaagaaggacatatggaatgggtaggtgagctcaggtctcttcagcatctgacaatacagtactactggaagctagaggaattgcccgatagcatgagacaactcacacagttacaatcattaactctgcaaaactgttatagtttgacatcactgccgttatggttaggagaacttgcctctctcaaaagacttctaatcaggagctgccatgccattatgagtctgccagaaagtctcacaagtctccaagagttaactatctatgacagcggtaaaatcacgactctgccggagagtctcacaagtctccagtggttatctattaaatgctgccctaaattaaagaagtggtgcgaagcagaggagaacaagacgaagcttgatcacataaaaggaaaggttcttgaatat

SEQ ID NO: 186 - protein, 1189 aa, Avena abyssinica
MAAAAVVGMVASGVIKVVIQEIGSAIKGELKLHKNLRKDMEKMKMTLEAVEAVLSVAERRSITDEPTRLWLKRLKDALYEISDMLDDFKADEKNLLEGVVKKFKMPNKMKEMQQRLQEISEDHMKYSIPAETRSDKQPVPDIRETPVNAEETDPIGRTDNKQKIMGRLSKGTTEETTFLSIWGFGGIGKTTLARLVYKDPQFKEYSKAWVYVSEKLDLKKIGNSIISQLSEKEEQTKIDELKIIHDCLEKLLAGNKKILIILDDLWEKRPSELEKLKVMLKQAEGSKVMVVVTTREESTAKEFGSVDPYCLAPLTDEMCWNIIKQKCNFEACPYKERFEPIGKEIAKRCGGVPLAAQSLGHMLKYKPYDVWVSVRSNHIWNLPNARDTSSTHEVLASLLLSYNFIDNPSLKLCFAYCAIFPKGHNIIKDDLIHQWIALGFMEPYTNNILSTWQLGESYVRQLLEMSFLQHSKTVAERFYAREDDTLFTMHDLVHDLARSVMADELYLKGPNCRYACLTDFTKPLKSSATSPAKIKALHIVDHPDDCLKENQFHPDAYSQAKHLRVLVLDVSPYSLRELPSIGKLKQLRYLSVPNISGRMDLRCITQLIKLNYLNLSGSKHLSGLPESISEIKGLMHLDLSYCRNLKELPLSFGTLRELVYLDLSHCRGVLGIPEALGGLTKLQHLGLSECKNLRGLPEVIGSLTELRYLNLTGCMHYIFASSSENQTESFIHCICTLPNMQQLNLSRNEYYLSIPGSARRLKKLNLCGCSNVTGLPRYAAKMNGIISEQLELEPIFSVYAYGTGSRSNLYLLQPINRDVLHIEMLENVQCAEEANSININKKQEIRKLTLEWTRDANRCVEDKELLRELVPPTSLNEFMIEGYSSVAFPDWLMNISNYLPNLGSIVMWDLPRCSHLPPLAQLPNLRVLTLKGMESLEEWNTTDSSLSGPMFRMLQEVNIHCCPKLRIKPRLPRAASWNISGGGNVLTSWGEIASHTGASSSSSPVCTHLSVQYTNVPLLQWNLLHHVPSVSDLRIEFCSDLTSSPEIIRALRSLRSLTLSFQEGHMEWVGELRSLQHLTIQYYWKLEELPDSMRQLTQLQSLTLQNCYSLTSLPLWLGELASLKRLLIRSCHAIMSLPESLTSLQELTIYDSGKITTLPESLTSLQWLSIKCCPKLKKWCEAEENKTKL

SEQ ID NO: 187 - DNA, 2970 bp, Briza media
  CDS (1)..(2970)
atggagtctgcggcggcgagcgctttcctgaagggcgtgatggggaggctcttccaggtgctggagaaggagtacaacaagcagaagggcctgcggcaggagaccctctccatccagcaggacctccgcatgatcgccgccgccatggacgaccgcctccacgccctcgggagtggccagcgccgcacggccgtcgccaggctgtacagcgaggagatgctcggcctggcgcacgacgcgcaggactgcgtcgaccgcatcgtgcaccgcctgacctgcaggccgtcccgcggcggcggcggggcgtcgccgtcggcgtttatacgccgggtcgcacacgaggtcaagaaagttcagagccgctcgggcttcgccgacgagatccacaagctcaaggcccgcctcaagcaggcgcacgagcgggtcgtcggaatccccatcgctgcaaccgtctgccacgaatccaccgccgtggcggcctactcgtcgtcgcgccgggtggagcgcaacccggtgggcatcgggaagcccgtggaggagctcctgtcgatgctggacgaggtggagggcgagcaggagcagctgagggtgatctctgtggtggggttcggcggattggggaagaccaccctcgcgagggcggtctacgacagcccttgtgcggcggtgaaattcgaccgccgtgcttgggttggcgctagtcggtggtcgccggagaccaatgggggcggggtcagtcagatcctgcgcgacatactccagcagtttcgtcccaaagacgccatgaatgttgccgttgaaggccaaagtcttgaagccttgctcactgaatacctcaagactatgaggtacttaattgtcatagatgacattgggatggagcaatggagcaccataaattccatctttgaagactgtggcagaagcagcagaatcttactgaccacaactgttcagtcaacagctaatatttgcagccatggcaacggttacgtgtacctactgaacacacttggtgaagaggactccaaggagatagctcttggggtacgatcacctgagctggagcagggttcgacgaagctcctccagaaatgtggtggtcttccacttgcgcttgtgagtgtctctgattttctgaaaagttcagttgagcctacaggggagctgtgctcaaatctatgccgcaacctgggttctcatctgctagagaagcatggccattacaacttcacagaactaagaaaggtgcttatgcataactatgacagtttgtctgtgtatgatatgacctgcttgctatatcttggtgtgtttccaagcaatagtccccttaagaggaaagttctgatcaggcggtggttagctgagggatatgcgcggaatgattctcttcgcagcgaagaggacatcgcagatgagactttcaaggcgcttatggatcggaatatcatccagtctattgatacaagaaacaatgcacaagtcaagacgtgcaggactcatggcatcatgcacgagtttgtgctgcacaagtccatgtcgcaggggttcattgcgacatcgtcgcgcgaccatccaagaccctgtgcctatgttaatcgtgctcgccacctttctatccatggtggcagtgtgacagatagtgaggcatctgacgaagatttatcttgtgttcggtctctgacagtctttgggaaagcaggtgatgctatttcttttgttcgtaggtgcaaactgctacgagtcctggatctagaggaatgcaatgatctggaagacagtcaccttaaaaacataggcaagctatggcatctgaagtatcttagtgttgggggcactattgagaaacttcctagcagcatcgaaggattgcattgcttagagacactggatttaaggagaaccaagataaagacactgcccattgaggccattatgctcttccacttagcgcatctgttcggaaggtttacagttgacaaagatgatcttaagaatgcaaacaagatgagcaaagtaaagaagttcttgtctgaaaataagagtaacctgaagaccttagccgggtttgtcgccagcgagaggcaagggtttctgcaacttatgggtcatatgaaaaatctgagaaaggtcaagatatggtgtgagccagttacaaatggaagtaactatgccactgatctttccaaggtcattcaggaattcaccaaggttcctatggacagtgcaggtgctcgttctctatcacttcattcaggacaatgttctgaagacttgctgagttcgcttgattttgagccgtgccccgaaggttccaagtatgatataaggtcgctgaagctacatggcaagctactccagttacctccatttgttaccttgttgacaggtctcactgaactgtgtattacatcagctactcttacacgggatcttttatcttctctgatcaatttgggcaacctactttacctgaagctgatctgcgatcaacttgagaattttgaaatgaaaaaaggggcattcccaagcctgcgacgtctgtgctttgtagtgcgaagtcttgcttcacctctgccagtaatcgaacaaggagctctcccaaacctcgtctcactccaacttctctgccccggtctggttggcctttctggtatccaaattaggtacctcagacatcttaaggaggtcgccattgatcgtgcagcggctgaccaaacaagacaagattgggaacaagcaacaaagaaccacccgaataggccaagactcatgttgtttgaaagtggtgatccaatggaaactgagggaccagggcatggagaagcttctgccgtgagagaaaaacggaaaatatgcttagtgcaaccgagttcggatatcgattctggtctaaagaagatgcggctatcagagtcttcttcacggcttcaagtgatcctccattcgaattcctctatgcagata

SEQ ID NO: 188 - protein, 990 aa, Briza media
MESAAASAFLKGVMGRLFQVLEKEYNKQKGLRQETLSIQQDLRMIAAAMDDRLHALGSGQRRTAVARLYSEEMLGLAHDAQDCVDRIVHRLTCRPSRGGGGASPSAFIRRVAHEVKKVQSRSGFADEIHKLKARLKQAHERVVGIPIAATVCHESTAVAAYSSSRRVERNPVGIGKPVEELLSMLDEVEGEQEQLRVISVVGFGGLGKTTLARAVYDSPCAAVKFDRRAWVGASRWSPETNGGGVSQILRDILQQFRPKDAMNVAVEGQSLEALLTEYLKTMRYLIVIDDIGMEQWSTINSIFEDCGRSSRILLTTTVQSTANICSHGNGYVYLLNTLGEEDSKEIALGVRSPELEQGSTKLLQKCGGLPLALVSVSDFLKSSVEPTGELCSNLCRNLGSHLLEKHGHYNFTELRKVLMHNYDSLSVYDMTCLLYLGVFPSNSPLKRKVLIRRWLAEGYARNDSLRSEEDIADETFKALMDRNIIQSIDTRNNAQVKTCRTHGIMHEFVLHKSMSQGFIATSSRDHPRPCAYVNRARHLSIHGGSVTDSEASDEDLSCVRSLTVFGKAGDAISFVRRCKLLRVLDLEECNDLEDSHLKNIGKLWHLKYLSVGGTIEKLPSSIEGLHCLETLDLRRTKIKTLPIEAIMLFHLAHLFGRFTVDKDDLKNANKMSKVKKFLSENKSNLKTLAGFVASERQGFLQLMGHMKNLRKVKIWCEPVTNGSNYATDLSKVIQEFTKVPMDSAGARSLSLHSGQCSEDLLSSLDFEPCPEGSKYDIRSLKLHGKLLQLPPFVTLLTGLTELCITSATLTRDLLSSLINLGNLLYLKLICDQLENFEMKKGAFPSLRRLCFVVRSLASPLPVIEQGALPNLVSLQLLCPGLVGLSGIQIRYLRHLKEVAIDRAAADQTRQDWEQATKNHPNRPRLMLFESGDPMETEGPGHGEASAVREKRKICLVQPSSDIDSGLKKMRLSESSSRLQVILHSNSSMQI
